(19) United States
(12) Patent Application Publication
(10) Pub. No.: US 2024/0139296 A1
(43) Pub. Date: May 2, 2024

(54) FORMULATIONS OF ACE2 FC FUSION PROTEINS

(71) Applicant: Formycon AG, Martinsried/Planegg (DE)

(72) Inventors: Alwin REITER, München (DE); Rainer SIGL, Landsberg am Lech (DE)

(73) Assignee: Formycon AG, Martinsried/Planegg (DE)

(21) Appl. No.: 18/548,525

(22) PCT Filed: Mar. 3, 2022
(86) PCT No.: PCT/EP2022/055457

§ 371 Date: Aug. 31, 2023

(30) Foreign Application Priority Data
Mar. 3, 2021 (EP) 21160545.6

(51) Int. Cl. A61K 38/48; A61K 47/02; A61K 47/12; A61K 47/18; A61K 47/26; C12N 9/48

(52) U.S. Cl. CPC A61K 38/4813; A61K 47/02; A61K 47/12; A61K 47/183; A61K 47/26; C12N 9/485; C12Y 304/17023; C07K 2319/30

(57) ABSTRACT

The present invention relates to pharmaceutical compositions of ACE2 Fc fusion proteins and therapeutic uses thereof, in particular in the treatment of infections with SARS-CoV-2.

### FIELD OF THE INVENTION

[0001] The present invention relates to pharmaceutical compositions of ACE2 Fc fusion proteins and therapeutic uses thereof, in particular in the treatment of infections with SARS-CoV-2.

### BACKGROUND OF THE INVENTION

[0002] ACE2 (angiotensin converting enzyme 2) is a key metalloprotease of the renin-angiotensin system with a catalytic zinc atom in the centre (Donoghue et al. (2002) Circ. Res. 87: e1-e9). Full-length ACE2 consists of an N-terminal extracellular peptidase domain, a collectrin-like domain, a single transmembrane helix and a short intracellular segment. It acts to cleave Angiotensin II to produce Angiotensin (1-7) and Angiotensin I to produce Angiotensin (1-9) which is then processed by other enzymes to become Angiotensin (1-7). ACE2 acts to lower the blood pressure and counters the activity of ACE in order to maintain a balance in the Ras/MAS system. Accordingly, it is a promising target for the treatment of cardiovascular diseases.

[0003] Recently, ACE2 has gained much attention as a receptor for coronaviruses and in particular the novel coronavirus SARS-CoV-2. SARS-CoV-2 is a coronavirus which was first discovered in December 2019 in Wuhan, China, but spread rapidly all over the world, leading to a world-wide pandemic. The pandemic led to a lock-down in many countries with very significant economic and social effects.

[0004] It was shown that ACE2 functions as a receptor for SARS-CoV (Li et al. (2003) Nature 426: 450-454; Prakabaran et al. (2004) Biochem. Biophys. Res. Comm. 314: 235-241) and for SARS-CoV-2 (Yan et al. (2020) Science 367: 1444-1485). Further, entry of SARS-CoV-2 into the respiratory cells depends on ACE2 and the serine protease TMPRSS2 (Hoffmann et al. (2020) Cell 181: 1-10).

[0005] In view of the important role of ACE2 for virus entry into the cell, it was proposed to use soluble ACE2 for blocking SARS binding to the cell (WO 2005/032487; WO 2006/122819). The same approach was also suggested for the treatment of infections with SARS-CoV-2 (Kruse (2020) F1000Res. 9:72). Clinical trials with a soluble form of ACE2 in the treatment of infections with SARS-CoV-2 have been initiated by the company Apeiron (Pharmazeutische Zeitung, 10 Apr. 2020) and the first results showed that one patient with severe Covid-19 caused by SARS-CoV-2 recovered fast upon treatment with soluble ACE2 (Zoufaly et al. (2020) The Lancet Respiratory Medicine 8: 1154-1158).

[0006] However, isolated receptor domains are typically characterized by a low stability and plasma half-life. For the soluble form of ACE2 a dose-dependent terminal half-life of 10 hours was shown (Haschke et al. (2013) Clin. Pharmacokinet. 52: 783-792). In view of these results, it was decided to administer the soluble form of ACE2 as twice-daily infusion in a later study (Khan et al. (2017) Critical Care 21: 234). However, an administration of more than one time per day is inconvenient both for the patient and the medical personnel.

[0007] A fusion protein of ACE2 consisting of the extracellular domain of either enzymatically active or enzymatically inactive ACE2 linked to the Fc domain of human IgG1 was constructed and tested. It was shown that both constructs potently neutralized both SARS-CoV and SARS-CoV-2 and inhibited S protein-mediated fusion (Lei et al. (2020) Nature Communications 11: 2070). Liu et al. (2020) Int. J. Biol. Macromol. 165: 1626-1633 describe fusion proteins of wild-type ACE2 and nine ACE2 mutants affecting catalytic activity of ACE2 with the Fc region of human IgG1. However, the interaction of the Fc domain of human IgG1 with Fc gamma receptors on immune cells may enhance the virus infection (Perlman and Dandekar (2005) Nat. Rev. Immunol. 5(12): 917-927; Chen et al. (2020) Current Tropical Medicine Reports 3:1-4).

[0008] Tada et al. (2020), available at https://www.biorxiv.org/content/10.1101/2020.09.16.300319v1.full, disclose an “ACE2 microbody” in which the extracellular domain of catalytically inactive ACE2 is fused to the Fc domain of the immunoglobulin heavy chain.

[0009] Svilenov et al. (2020), available at Efficient inhibition of SARS-CoV-2 strains by a novel 10 ACE2-IgG4-Fc fusion protein with a stabilized hinge region|bioRxiv and https://www.sciencedirect.com/science/article/pii/S016635422100187X?via %3Dihub, International patent applications WO 2021/234160 A2 and PCT/EP2021/080130 are directed to fusion proteins of the extracellular domain of ACE2 with the Fc domain of human IgG1 or IgG4. European patent application EP 21 210 215.6 is directed to highly sialylated and/or afucosylated forms of fusion proteins of the extracellular domain of ACE2 with the Fc domain of human IgG1 or IgG4 as well as to such fusion proteins which additionally comprise IP10.

[0010] European patent application EP 21 188 832.6 discloses ACE2 fusion proteins with the Fc domain of IgM and IgG2.

[0011] WO 2021/170113, WO 2021/183404, US 2021/0284716, WO 2021/217120, WO 2021/213437, WO 2021/189772, WO 2021/231466, WO 2021/237239, WO 2021/203103, WO 2021/174107, WO 2021/236957, WO 2021/203098, WO 2021/227937, WO 2021/213421, WO 2021/205183, WO 2021/202427, WO 2021/194909, WO 2021/170131, WO 2022/012688, WO 2022/006601, WO 2021/263128 and WO 2021/257512 also disclose fusion proteins of ACE2 with the Fc part of different immunoglobulins.

[0012] There is a need for pharmaceutical compositions of ACE2 Fc fusion proteins which provide the required protein stability during storage and which are well tolerated by human patients.

[0013] In clinical trials using soluble recombinant human ACE2 a formulation comprising 5.2 mg/ml recombinant human ACE2 in 100 mM glycine, 150 mM NaCl and 50 μM zinc chloride at a pH of 7.5 was used (Haschke et al. (2013) Clin. Pharmacokinet. 52: 783-792).

### SUMMARY OF THE INVENTION

[0014] The present invention provides stable liquid formulations of ACE2 Fc fusion proteins which are suitable for administration to human subjects.

[0015] The present invention provides a liquid pharmaceutical composition comprising:
[0016] (a) a fusion protein comprising a first part comprising a fragment of human ACE2 or a variant of said fragment, said human ACE2 having the amino acid sequence according to SEQ ID No. 1, and a second part comprising the Fc portion of a human IgG; and
[0017] (b) a buffer having a pH of 5.6 to 6.3.

[0018] The present invention provides a liquid pharmaceutical composition comprising:
[0019] (a) a fusion protein comprising a first part comprising a fragment of human ACE2 or a variant of said fragment, said human ACE2 having the amino acid sequence according to SEQ ID No. 1, and a second part comprising a variant of the Fc portion of a human IgG; and
[0020] (b) a buffer having a pH of 5.6 to 6.3.

[0021] In one embodiment, the buffer is selected from the group consisting of acetate buffer, histidine buffer, phosphate buffer and succinate buffer, preferably the buffer is present in a concentration of 5 mM to 60 mM.

[0022] The liquid pharmaceutical composition may further comprise a sugar or a sugar alcohol, preferably the sugar or sugar alcohol is selected from trehalose, sucrose and mannitol and/or the sugar or sugar alcohol is present in a concentration of 100 mM to 300 mM.

[0023] The liquid pharmaceutical composition may further comprise a non-ionic surfactant, preferably the non-ionic surfactant is selected from polysorbate 20 and polysorbate 80 and/or the non-ionic surfactant is present in a concentration of 0.01% (w/v) to 0.2% (w/v).

[0024] The liquid pharmaceutical composition may further comprise an inorganic salt, preferably the inorganic salt is sodium chloride and/or the inorganic salt is present in a concentration of 30 mM to 150 mM.

[0025] The liquid pharmaceutical composition may further comprise one or more amino acids, preferably the one or more amino acids are L-arginine and/or L-methionine and/or the one or more amino acids are present in a concentration of 1 mM to 50 mM.

[0026] In one embodiment the fragment of human ACE2 consists of the amino acid sequence according to SEQ ID No. 2 or is the extracellular domain of ACE2 consisting of the amino acid sequence according to SEQ ID No. 3.

[0027] The IgG may be IgG1 or IgG4.

[0028] In one embodiment the fusion protein comprises the Fc portion of human IgG4 comprising the amino acid sequence according to SEQ ID NO: 5 or a variant of the Fc portion of human IgG4 comprising the amino acid sequence according to any one of SEQ ID NOs: 20 and 21.

[0029] In one embodiment the IgG is IgG4 or a variant of IgG4 and the first part and the second part are linked by the amino acid sequence according to SEQ ID No. 18.

[0030] In one embodiment the fusion protein comprises the Fc portion of human IgG1 comprising the amino acid sequence according to SEQ ID NO: 4 or a variant of the Fc portion of human IgG1 comprising the amino acid sequence according to any one of SEQ ID NOs: 22 and 23.

[0031] In one embodiment the IgG is IgG1 or a variant of IgG1 and the first part and the second part are linked by the amino acid sequence according to SEQ ID No. 19.

[0032] The variant of the human ACE2 fragment may be an enzymatically inactive variant of human ACE2, preferably the enzymatically inactive variant of human ACE2 comprises a H374N and a H378N mutation, the numbering referring to SEQ ID No. 1.

[0033] In one embodiment the fusion protein has the amino acid sequence according to any one of SEQ ID Nos. 6 to 13, 26 to 41, 44 to 55, 58 to 69, 72 to 83 and 86 to 97.

[0034] In one embodiment the ACE2 part of the fusion protein is N-glycosylated and 70% to 95% of the N-glycans on the ACE2 part have at least one sialic acid molecule attached thereto.

[0035] The present invention also relates to a liquid pharmaceutical composition comprising:
[0036] (a) a fusion protein comprising a first part comprising a fragment of human ACE2 or a variant of said fragment, said human ACE2 having the amino acid sequence according to SEQ ID No. 1, and a second part comprising the Fc portion of a human IgG or a variant of the Fc portion of a human IgG; and
[0037] (b) an acetate buffer having a pH of 5.6 to 5.8;
[0038] (c) polysorbate 20 or polysorbate 80;
[0039] (d) trehalose or sucrose; and
[0040] (e) optionally, one or more stabilizers selected from the group consisting of L-arginine, L-methionine and sodium chloride.

[0041] In one embodiment, the concentration of the ACE2 Fc fusion protein is 1-60 mg/ml.

[0042] The present invention also relates to the liquid pharmaceutical composition as disclosed herein for use in preventing and/or treating an infection with a coronavirus binding to ACE2, preferably wherein the coronavirus binding to ACE2 is selected from the group consisting of SARS, SARS-CoV2 and NL63, preferably it is SARS-CoV2.

### DETAILED DESCRIPTION OF THE INVENTION

[0043] The present invention as illustratively described in the following may suitably be practiced in the absence of any element or elements, limitation or limitations, not specifically disclosed herein.

[0044] The present invention will be described with respect to particular embodiments, but the invention is not limited thereto, but only by the claims.

[0045] Where the term “comprising” is used in the present description and claims, it does not exclude other elements. For the purposes of the present invention, the term “consisting of” is considered to be a preferred embodiment of the term “comprising”. If hereinafter a group is defined to comprise at least a certain number of embodiments, this is also to be understood to disclose a group which preferably consists only of these embodiments.

[0046] For the purposes of the present invention, the term “obtained” is considered to be a preferred embodiment of the term “obtainable”. If hereinafter e.g. a cell or organism is defined to be obtainable by a specific method, this is also to be understood to disclose a cell or organism which is obtained by this method.

[0047] Where an indefinite or definite article is used when referring to a singular noun, e.g. “a”, “an” or “the”, this includes a plural of that noun unless something else is specifically stated.

[0048] The term “pharmaceutical composition” as used herein refers to any composition comprising a chemical substance or active ingredient such as the ACE2 Fc fusion protein which composition is intended for use in the medical cure, treatment, or prevention of disease and which is in such a form as to permit the active ingredient to be effective. In particular, a pharmaceutical composition does not contain excipients which are unacceptably toxic to a subject to which the composition is to be administered. The pharmaceutical compositions are sterile, i.e. aseptic and free from all living microorganisms and their spores. The pharmaceutical composition used in the present invention is liquid and stable.

[0049] In a “liquid pharmaceutical composition” the pharmaceutically active agent, e.g. the ACE2 Fc fusion protein, can be combined with a variety of excipients to ensure a stable active medication following storage. In one embodiment, the liquid pharmaceutical composition used in the invention is at no point lyophilized, i.e. the production method does not contain a lyophilization step and the composition is not lyophilized for storage. Liquid pharmaceutical compositions can be stored in vials, IV bags, ampoules, cartridges, and prefilled or ready-to-use syringes.

[0050] A “stable” liquid composition is one in which the ACE2 Fc fusion protein contained therein essentially retains its physical stability and/or chemical stability and/or biological activity upon storage for a certain period. Preferably, the composition essentially retains upon storage its physical and chemical stability, as well as its biological activity. Various analytical techniques for measuring protein stability are available in the art and are reviewed, for example, in Peptide and Protein Drug Delivery, 247-301, Vincent Lee Ed, Marcel Dekker, Inc, New York, New York, Pubs (1991) and Jones, Adv Drug Delivery Rev, 1993, 10:29-90. For example, stability can be measured at a selected temperature for a selected time period. Stability can be evaluated qualitatively and/or quantitatively in a variety of different ways, including evaluation of aggregate formation (for example using size exclusion chromatography, by measuring turbidity, and/or by visual inspection), by assessing charge heterogeneity using cation or anion exchange chromatography or capillary zone electrophoresis, amino-terminal or carboxy-terminal sequence analysis, mass spectrometric analysis, SDS-Capillary gel electrophoresis analysis to detect aggregated or fragmented molecules, peptide map (for example tryptic or LYS-C) analysis, evaluating biological activity or binding of the agonist, etc.

[0051] Preferably, the pharmaceutical composition is stable at a temperature of about 40° C. and 75% relative humidity for at least 1 to 2 weeks, and/or is stable at a temperature of about 5° C. for at least 3 months, preferably 6 or 8 months and more preferably one year, and/or is stable at a temperature of about 25° C. and 60% relative humidity for at least two weeks or one month. Furthermore, the formulation is preferably stable following freezing (to, e.g., −20° C. or −80° C.) and thawing of the formulation at 25° C. as described in the examples herein, for example following 1, 2, 3 or 4 cycles of freezing and thawing.

[0052] For example, in the pharmaceutical composition used in the present invention the absolute increase of the percentage of high molecular weight species in the sample after storage for 3 months at a temperature of 5° C. compared to the percentage of high molecular weight species in the sample before storage for 3 months at a temperature of 5° C. as measured by size exclusion chromatography is not more than 10 percentage points, preferably not more than 8 percentage points and more preferably not more than 5 percentage points. For example, if the percentage of high molecular weight species in the sample before storage for 3 months at a temperature of 5° C. was 0.5%, the percentage of high molecular weight species in the sample after storage for 3 months at a temperature of 5° C. is not more than 10.5%, preferably not more than 8.5% and more preferably not more than 5.5%.

[0053] A “buffer” is an aqueous solution consisting of a mixture of a weak acid and its conjugate base or vice versa which resists changes in pH and therefore keeps the pH at a nearly constant value. The buffer used in the present invention has a pH in the range from about 5.4 to about 6.4. Preferably, the buffer used in the present invention has a pH in the range from about 5.4 to about 6.2, more preferably in the range from about 5.4 to 6.0 and most preferably in the range from 5.4 to 5.9 or 5.6 to 5.8. The buffer used in the present invention has a pH of 5.4, 5.5, 5.6, 5.7, 5.8, 5.9, 6.0, 6.1, 6.2, 6.3 or 6.4, preferably of 5.6 or 5.8.

[0054] The buffer used in the present invention is selected from the group consisting of an acetate buffer, a histidine buffer, a citrate buffer, a phosphate buffer and a succinate buffer. Preferably, the liquid pharmaceutical composition of the present invention comprises only one buffer type, more preferably it comprises only one buffer type selected from an acetate buffer, a histidine buffer, a citrate buffer, a phosphate buffer and a succinate buffer. Most preferably, the liquid pharmaceutical composition of the present invention comprises an acetate buffer.

[0055] The terms “histidine-containing buffer” and “histidine buffer” are used interchangeably herein and refer to a buffer comprising histidine. Examples of histidine buffers include histidine chloride, histidine hydrochloride, histidine acetate, histidine phosphate, and histidine sulfate. The preferred histidine buffer of the invention further comprises L-histidine. Even more preferably the histidine buffer of the invention comprises histidine hydrochloride, most preferably it comprises histidine hydrochloride and L-histidine. Preferably, the histidine buffer or histidine hydrochloride buffer or histidine hydrochloride/L-histidine buffer has a pH in the range from about 5.4 to 6.4, preferably from about 5.8 to 6.3, more preferably from 5.9 to 6.2 and most preferably has a pH of about 6.0. Preferably, the histidine buffer or histidine hydrochloride buffer or histidine hydrochloride/L-histidine buffer has a pH of 5.8, 5.9, 6.0, 6.1, 6.2 or 6.3.

[0056] In a particular preferred embodiment, the histidine-containing buffer comprises histidine hydrochloride/L-histidine in a concentration of 5 to 30 mM, preferably of 7 to 20 mM, more preferably of 8 to 15 mM and most preferably of 10 mM.

[0057] In another particular preferred embodiment the histidine buffer has a concentration of 10 mM. In another particular preferred embodiment the histidine buffer has a concentration of 10 mM and a pH of 6.0.

[0058] In another particular preferred embodiment the buffer is histidine hydrochloride/L-histidine with a concentration of 10 mM. In another particular preferred embodiment the buffer is histidine hydrochloride/L-histidine with a concentration of 10 mM and with a pH of 6.0.

[0059] In an alternative embodiment, the buffer is an acetate buffer. The acetate buffer may be prepared by mixing glacial acetic acid with an acetate salt such as sodium acetate. The acetate buffer has a concentration of 1 mM to 50 mM, preferably of 3 mM to 40 mM, more preferably of 5 mM to 30 mM, even more preferably of 7 mM to 20 mM and most preferably of 10 mM. Preferably, the acetate buffer has a pH in the range from about 5.4 to 6.0, preferably from about 5.5 to 5.9 or 5.6 to 6.0 or 5.6 to 5.8, and most preferably has a pH of about 5.6 or 5.8. Preferably, the acetate buffer has a pH of 5.4, 5.5, 5.6, 5.7, 5.8, 5.9 or 6.0.

[0060] In one embodiment, the acetate buffer has a concentration of 10 mM. In another embodiment the acetate buffer has a concentration of 10 mM and a pH of 5.6 or 5.8, preferably the acetate buffer has a concentration of 10 mM and a pH of 5.8.

[0061] In one embodiment, the acetate buffer comprises glacial acetic acid and sodium acetate in a concentration of 10 mM. In another embodiment the acetate buffer comprises glacial acetic acid and sodium acetate in a concentration of 10 mM and with a pH of 5.6 or 5.8, preferably the acetate buffer comprises glacial acetic acid and sodium acetate in a concentration of 10 mM and with a pH of 5.8.

[0062] In an alternative embodiment, the buffer is a phosphate buffer. The phosphate buffer may be prepared by mixing sodium phosphate monobasic with sodium phosphate dibasic. The phosphate buffer has a concentration of 1 mM to 50 mM, preferably of 3 mM to 40 mM, more preferably of 5 mM to 30 mM, even more preferably of 7 mM to 20 mM and most preferably of 10 mM. Preferably, the phosphate buffer has a pH in the range from about 5.5 to 6.3, preferably from about 5.5 to 6.2, and most preferably has a pH of about 6.0. Preferably, the phosphate buffer has a pH of 5.5, 5.6, 5.7, 5.8, 5.9, 6.0, 6.1, 6.2 or 6.3.

[0063] In one embodiment, the phosphate buffer has a concentration of 10 mM. In another embodiment the phosphate buffer has a concentration of 10 mM and a pH of 6.0.

[0064] In one embodiment, the phosphate buffer comprises sodium phosphate monobasic and sodium phosphate dibasic in a concentration of 10 mM. In another embodiment the phosphate buffer comprises sodium phosphate monobasic and sodium phosphate dibasic in a concentration of 10 mM and with a pH of 6.0.

[0065] In an alternative embodiment, the buffer is a succinate buffer. The succinate buffer may be prepared by mixing succinic acid with disodium succinate. The succinate buffer has a concentration of 1 mM to 50 mM, preferably of 3 mM to 40 mM, more preferably of 5 mM to 30 mM, even more preferably of 7 mM to 20 mM and most preferably of 10 mM. Preferably, the succinate buffer has a pH in the range from about 5.8 to 6.5, preferably from about 6.0 to 6.4, and most preferably has a pH of about 6.3. Preferably, the succinate buffer has a pH of 5.8, 5.9, 6.0, 6.1, 6.2, 6.3, 6.4 or 6.5.

[0066] In one embodiment, the succinate buffer has a concentration of 10 mM. In another embodiment the succinate buffer has a concentration of 10 mM and a pH of 6.3.

[0067] In one embodiment, the succinate buffer comprises succinic acid and disodium succinate in a concentration of 10 mM. In another embodiment the succinate buffer comprises succinic acid and disodium succinate in a concentration of 10 mM and with a pH of 6.3.

[0068] In an alternative embodiment, the buffer is a citrate buffer. The citrate buffer is prepared by mixing citric acid with a citrate salt such as sodium citrate. The citrate buffer has a concentration of 1 mM to 50 mM, preferably of 3 mM to 40 mM, more preferably of 5 mM to 30 mM, even more preferably of 7 mM to 20 mM and most preferably of 10 mM. Preferably, the citrate buffer has a pH in the range from about 5.4 to 6.0, preferably from about 5.5 to 5.9, and most preferably has a pH of about 5.8. Preferably, the citrate buffer has a pH of 5.4, 5.5, 5.6, 5.7, 5.8, 5.9 or 6.0.

[0069] In one embodiment, the citrate buffer comprises citric acid and sodium citrate in a concentration of 10 mM. In another embodiment the citrate buffer comprises citric acid and sodium citrate in a concentration of 10 mM and with a pH of 5.8.

[0070] A “surfactant” as used herein refers to an amphiphilic compound, i.e. a compound containing both hydrophobic groups and hydrophilic groups which lowers the surface tension (or interfacial tension) between two liquids or between a liquid and a solid. A “non-ionic surfactant” has no charged groups in its head. The formation of insoluble particles during freeze/thaw cycles of protein-containing compositions can be remarkably inhibited by addition of surfactants. Examples of “non-ionic surfactants” include e.g. polyoxyethylene glycol alkyl ethers, such as octaethylene glycol monododecyl ether, pentaethylene glycol monododecyl ether; polyoxypropylene glycol alkyl ethers; glucoside alkyl ethers, such as decyl glucoside, lauryl glucoside, octyl glucoside; polyoxyethylene glycol octylphenol ethers, such as triton X-100; polyoxyethylene glycol alkylphenol ethers, such as nonoxynol-9; glycerol alkyl esters, such as glyceryl laurate; polyoxyethylene glycol sorbitan alkyl esters, such as polysorbate; sorbitan alkyl esters, such as spans; cocamide MEA, cocamide DEA, dodecyldimethylamine oxide; block copolymers of polyethylene glycol and polypropylene glycol, such as poloxamers; and polyethoxylated tallow amine (POEA). The liquid pharmaceutical composition of the present invention can contain one or more of these surfactants in combination. In a preferred embodiment the liquid pharmaceutical composition of the present invention comprises only one non-ionic surfactant.

[0071] Preferred non-ionic surfactants for use in the liquid pharmaceutical composition of the present invention are polysorbates such as polysorbate 20, 40, 60 or 80, and especially polysorbate 20 (i.e. Tween 20) or polysorbate 80 (i.e. Tween 80). Another preferred non-ionic surfactant for use in the pharmaceutical compositions of the present invention is poloxamer 188.

[0072] The concentration of the non-ionic surfactant is in the range of 0.005 to 0.20% (w/v), preferably in the range of 0.01 to 0.10% (w/v), and most preferably in the range of 0.02 to 0.10% (w/v), relative to the total volume of the composition.

[0073] In a preferred embodiment, the non-ionic surfactant is polysorbate 20. In a preferred embodiment, the non-ionic surfactant is polysorbate 20 with a concentration in the range of 0.005% to 0.20% (w/v), preferably in the range of 0.008 to 0.05% (w/v), and most preferably in the range of 0.01 to 0.04% (w/v), relative to the total volume of the composition.

[0074] In another preferred embodiment, the non-ionic surfactant is polysorbate 80 with a concentration in the range of 0.005% to 0.20% (w/v), preferably in the range of 0.008 to 0.15% (w/v), and most preferably in the range of 0.02 to 0.1% (w/v), relative to the total volume of the composition.

[0075] In one embodiment, the non-ionic surfactant is polysorbate 20 with a concentration of 0.02% (w/v).

[0076] In one embodiment, the buffer is an acetate buffer with a concentration of 20 mM and a pH of 5.6 and the surfactant is polysorbate 20 with a concentration of 0.02% (w/v).

[0077] In one embodiment, the buffer is an acetate buffer with a concentration of 20 mM and a pH of 5.8 and the surfactant is polysorbate 20 with a concentration of 0.02% (w/v).

[0078] In one embodiment, the buffer is an acetate buffer with a concentration of 10 mM and a pH of 5.6 and the surfactant is polysorbate 20 with a concentration of 0.02% (w/v).

[0079] In one embodiment, the buffer is an acetate buffer with a concentration of 10 mM and a pH of 5.8 and the surfactant is polysorbate 20 with a concentration of 0.02% (w/v).

[0080] In one embodiment, the buffer is a histidine buffer with a concentration of 10 mM and a pH of 6.0 and the surfactant is polysorbate 20 with a concentration of 0.02% (w/v).

[0081] The term “sugar” refers to an organic compound comprising only carbon, hydrogen, and oxygen, usually with a hydrogen:oxygen atom ratio of 2:1 and the empirical formula Cm(H2O)n. The term “sugar” includes mono-, di-, oligo- and polysaccharides. Examples of sugars include glucose, fructose, galactose, xylose, ribose, sucrose, mannose, lactose, maltose, trehalose, starch, and glycogen. Preferably, the sugar is a non-reducing sugar.

[0082] Non-reducing sugars are sugars which are not able to act as a reducing agent, as they do not comprise a free aldehyde or ketone group. Preferably, the non-reducing sugar is selected from sucrose and trehalose.

[0083] In one embodiment, the sugar is trehalose. Trehalose is a non-reducing sugar. It is a disaccharide formed by a 1,1-glycosidic bond between a glucose and a fructose unit.

[0084] Preferably, the dihydrate form of trehalose is used. The terms “trehalose” and “trehalose dihydrate” are used interchangeably herein. The concentration of trehalose dihydrate in the liquid pharmaceutical composition of the present invention is 100 mM to 300 mM, preferably the concentration of trehalose dihydrate is 100 mM to 250 mM, more preferably the concentration of trehalose dihydrate is 106 mM to 250 mM, even more preferably the concentration of trehalose dihydrate is 106 mM, 220 mM or 250 mM and most preferably the concentration of trehalose dihydrate is 250 mM.

[0085] In one embodiment, the sugar is sucrose. Sucrose is a non-reducing sugar. It is a disaccharide formed by a 1,2-glycosidic bond between two α-glucose units. The concentration of sucrose in the liquid pharmaceutical composition of the present invention is 100 mM to 300 mM, preferably the concentration of sucrose is 120 mM to 280 mM, more preferably the concentration of sucrose is 145 mM to 263 mM and most preferably the concentration of sucrose is 145 mM or 263 mM.

[0086] In one embodiment, the buffer is an acetate buffer with a concentration of 20 mM and a pH of 5.6 and the sugar is trehalose with a concentration of 106 mM.

[0087] In one embodiment, the buffer is an acetate buffer with a concentration of 20 mM and a pH of 5.6 and the sugar is trehalose with a concentration of 250 mM.

[0088] In one embodiment, the buffer is an acetate buffer with a concentration of 10 mM and a pH of 5.8 and the sugar is trehalose with a concentration of 106 mM.

[0089] In one embodiment, the buffer is an acetate buffer with a concentration of 10 mM and a pH of 5.8 and the sugar is trehalose with a concentration of 250 mM.

[0090] In one embodiment, the buffer is an acetate buffer with a concentration of 20 mM and a pH of 5.6 and the sugar is sucrose with a concentration of 263 mM.

[0091] In one embodiment, the buffer is an acetate buffer with a concentration of 10 mM and a pH of 5.8 and the sugar is sucrose with a concentration of 263 mM.

[0092] In one embodiment, the buffer is an acetate buffer with a concentration of 10 mM and a pH of 5.6, the sugar is trehalose with a concentration of 106 mM and the surfactant is polysorbate 20 with a concentration of 0.02% (w/v).

[0093] In one embodiment, the buffer is an acetate buffer with a concentration of 10 mM and a pH of 5.8, the sugar is trehalose with a concentration of 106 mM and the surfactant is polysorbate 20 with a concentration of 0.02% (w/v).

[0094] In one embodiment, the buffer is an acetate buffer with a concentration of 10 mM and a pH of 5.6, the sugar is trehalose with a concentration of 250 mM and the surfactant is polysorbate 20 with a concentration of 0.02% (w/v).

[0095] In one embodiment, the buffer is an acetate buffer with a concentration of 10 mM and a pH of 5.8, the sugar is trehalose with a concentration of 250 mM and the surfactant is polysorbate 20 with a concentration of 0.02% (w/v).

[0096] In one embodiment, the buffer is an acetate buffer with a concentration of 10 mM and a pH of 5.6, the sugar is sucrose with a concentration of 263 mM and the surfactant is polysorbate 20 with a concentration of 0.02% (w/v).

[0097] In one embodiment, the buffer is an acetate buffer with a concentration of 10 mM and a pH of 5.8, the sugar is sucrose with a concentration of 263 mM and the surfactant is polysorbate 20 with a concentration of 0.02% (w/v).

[0098] In one embodiment, the buffer is a histidine buffer with a concentration of 10 mM and a pH of 6.0 and the sugar is sucrose with a concentration of 145 mM.

[0099] In one embodiment, the buffer is a histidine buffer with a concentration of 10 mM and a pH of 6.0 and the sugar is trehalose with a concentration of 220 mM.

[0100] In one embodiment, the buffer is a histidine buffer with a concentration of 10 mM and a pH of 6.0 and the sugar is trehalose with a concentration of 250 mM.

[0101] In one embodiment, the buffer is a histidine buffer with a concentration of 10 mM and a pH of 6.0, the sugar is sucrose with a concentration of 145 mM and the surfactant is polysorbate 20 with a concentration of 0.02% (w/v).

[0102] In one embodiment, the buffer is a histidine buffer with a concentration of 10 mM and a pH of 6.0, the sugar is trehalose with a concentration of 220 mM and the surfactant is polysorbate 20 with a concentration of 0.02% (w/v).

[0103] In one embodiment, the buffer is a histidine buffer with a concentration of 10 mM and a pH of 6.0, the sugar is trehalose with a concentration of 250 mM and the surfactant is polysorbate 20 with a concentration of 0.02% (w/v).

[0104] In one embodiment the liquid pharmaceutical composition of the present invention comprises a sugar alcohol. Sugar alcohols are organic compounds derived from a sugar which contain a hydroxyl group attached to each carbon atom. Suitable sugar alcohols include glycerol, mannitol, sorbitol, and xylitol. The concentration of the sugar alcohol in the liquid pharmaceutical composition of the present invention is 50 mM to 300 mM, preferably the concentration of the sugar alcohol is 80 mM to 280 mM, more preferably the concentration of the sugar alcohol is 80 mM to 270 mM and most preferably the concentration of the sugar alcohol is 80 mM to 270 mM.

[0105] Preferably, the sugar alcohol is mannitol or sorbitol and more preferably the sugar alcohol is mannitol. The concentration of mannitol or sorbitol in the liquid pharmaceutical composition of the present invention is 50 mM to 300 mM, preferably the concentration of mannitol or sorbitol is 80 mM to 280 mM, more preferably the concentration of mannitol or sorbitol is 80 mM to 270 mM and most preferably the concentration of mannitol or sorbitol is 80 mM to 270 mM.

[0106] The concentration of mannitol in the liquid pharmaceutical composition of the present invention is 50 mM to 300 mM, preferably the concentration of mannitol is 80 mM to 280 mM, more preferably the concentration of mannitol is 80 mM to 270 mM and most preferably the concentration of mannitol is 80 mM to 270 mM.

[0107] In one embodiment the liquid pharmaceutical composition of the present invention comprises 88.5 mM, 198 mM, 225 mM or 252 mM sorbitol.

[0108] In one embodiment the liquid pharmaceutical composition of the present invention comprises 50 mM mannitol.

[0109] In one embodiment, the liquid pharmaceutical composition of the present invention comprises an inorganic salt. As used herein, an “inorganic salt” refers to an ionic compound which has osmoregulatory properties. An inorganic salt such as sodium chloride (NaCl) can dissociate in solution into its constituent ions, i.e. NaCl dissociates into Na+ and Cl− ions, which both affect the osmotic pressure, i.e. the osmolality, of the solution. Exemplary inorganic salts which may be present in the liquid pharmaceutical composition of the present invention are potassium chloride, calcium chloride, sodium chloride, sodium phosphate, potassium phosphate and sodium bicarbonate. In one embodiment, liquid pharmaceutical composition of the present invention comprises sodium chloride.

[0110] In one embodiment, the inorganic salt is present in a concentration of 20 to 150 mM, preferably in a concentration of 30 to 140 mM and more preferably in a concentration of 40 mM to 135 mM.

[0111] In one embodiment, the inorganic salt is sodium chloride and the sodium chloride is present in a concentration of 20 to 150 mM, preferably in a concentration of 30 to 140 mM and more preferably in a concentration of 40 mM to 135 mM. In one embodiment, the sodium chloride is present in a concentration of 40 mM to 50 mM, preferably in a concentration of 50 mM.

[0112] In one embodiment, the buffer is an acetate buffer with a concentration of 10 mM and a pH of 5.8 and the inorganic salt is sodium chloride with a concentration of 50 mM.

[0113] In one embodiment, the buffer is an acetate buffer with a concentration of 10 mM and a pH of 5.6 and the inorganic salt is sodium chloride with a concentration of 50 mM.

[0114] In one embodiment, the buffer is an acetate buffer with a concentration of 10 mM and a pH of 5.8 and the inorganic salt is sodium chloride with a concentration of 40 mM.

[0115] In one embodiment, the buffer is an acetate buffer with a concentration of 10 mM and a pH of 5.6 and the inorganic salt is sodium chloride with a concentration of 40 mM.

[0116] In one embodiment, the buffer is a histidine buffer with a concentration of 10 mM and a pH of 6.0 and the inorganic salt is sodium chloride with a concentration of 40 mM.

[0117] In one embodiment, the buffer is a histidine buffer with a concentration of 10 mM and a pH of 6.0 and the inorganic salt is sodium chloride with a concentration of 50 mM.

[0118] In one embodiment, the buffer is an acetate buffer with a concentration of 10 mM and a pH of 5.8, the surfactant is polysorbate 20 with a concentration of 0.02% (w/v) and the inorganic salt is sodium chloride with a concentration of 50 mM.

[0119] In one embodiment, the buffer is a histidine buffer with a concentration of 10 mM and a pH of 6.0, the surfactant is polysorbate 20 with a concentration of 0.02% (w/v) and the inorganic salt is sodium chloride with a concentration of 40 mM.

[0120] In one embodiment, the buffer is an acetate buffer with a concentration of 10 mM and a pH of 5.8, the surfactant is polysorbate 20 with a concentration of 0.02% (w/v), the sugar is trehalose with a concentration of 250 mM and the inorganic salt is sodium chloride with a concentration of 50 mM.

[0121] In one embodiment, the buffer is a histidine buffer with a concentration of 10 mM and a pH of 6.0, the surfactant is polysorbate 20 with a concentration of 0.02% (w/v), the sugar is sucrose with a concentration of 145 mM and the inorganic salt is sodium chloride with a concentration of 40 mM.

[0122] In one embodiment, the liquid pharmaceutical composition of the present invention comprises a salt of a transition metal such as salts of zinc, copper and manganese.

[0123] Exemplary salts of transition metals which may be present in the liquid pharmaceutical composition of the present invention include zinc chloride, zinc sulfate, copper chloride, copper sulfate, manganese chloride and manganese sulfate. In a preferred embodiment, the liquid pharmaceutical composition of the present invention comprises a zinc salt such as zinc chloride or zinc sulfate.

[0124] In one embodiment, the salt of a transition metal is zinc chloride and the zinc chloride is present in a concentration of 10 μM to 300 μM, preferably of 20 μM to 250 μM, more preferably of 30 μM to 220 μM and most preferably of 50 μM to 200 μM.

[0125] In one embodiment, the salt of a transition metal is zinc chloride and the concentration of the zinc ion is adjusted dependent on the concentration of the fusion protein present in the liquid pharmaceutical composition of the present invention. In one embodiment, the stoichiometric ratio between the amount of the fusion protein and the amount of the zinc ion is 1:2, i.e. two zinc ions per protein molecule are present in the liquid pharmaceutical composition of the present invention. In one example, the concentration of the fusion protein is 20 mg/ml and the concentration of the zinc ions is 200 μM.

[0126] In one embodiment, the liquid pharmaceutical composition of the present invention comprises one or more amino acids. In one embodiment the one or more amino acids are selected from the group of proteinogenic amino acids. In one embodiment, the one or more amino acids are selected from the group consisting of L-arginine, glycine, L-methionine, L-asparagine, L-glutamine, L-lysine, L-alanine, L-leucine, L-isoleucine, L-glutamic acid, L-aspartic acid and L-proline. In one embodiment, the liquid pharmaceutical composition of the present invention comprises L-arginine and/or L-methionine, preferably the liquid pharmaceutical composition of the present invention comprises L-arginine and L-methionine.

[0127] In one embodiment, the liquid pharmaceutical composition of the present invention does not comprise glycine. In one embodiment, the liquid pharmaceutical composition of the present invention does not comprise 100 mM glycine.

[0128] In one embodiment, the one or more amino acids is/are present in a concentration of 1 mM to 150 mM, preferably in a concentration of 2 mM to 140 mM and more preferably in a concentration of 5 mM to 135 mM.

[0129] In one embodiment, the liquid pharmaceutical composition of the present invention comprises L-arginine in a concentration of 20 mM to 60 mM, preferably of 25 mM to 55 mM, more preferably of 30 mM to 50 mM and most preferably of 30 mM. In one embodiment, the liquid pharmaceutical composition of the present invention comprises L-arginine in a concentration of 30 mM, 45 mM or 50 mM, preferably of 30 mM.

[0130] In one embodiment, the liquid pharmaceutical composition of the present invention comprises L-methionine in a concentration of 1 mM to 20 mM, preferably of 3 mM to 15 mM, more preferably of 5 mM to 10 mM and most preferably of 5 mM. In one embodiment, the liquid pharmaceutical composition of the present invention comprises L-methionine in a concentration of 5 mM or 10 mM.

[0131] In one embodiment, the liquid pharmaceutical composition of the present invention comprises L-methionine in a concentration of 5 mM and L-arginine in a concentration of 30 mM.

[0132] In one embodiment, the liquid pharmaceutical composition of the present invention comprises an acetate buffer with a concentration of 10 mM and a pH of 5.8 and 5 mM L-methionine.

[0133] In one embodiment, the liquid pharmaceutical composition of the present invention comprises an acetate buffer with a concentration of 10 mM and a pH of 5.8 and 30 mM L-arginine.

[0134] In one embodiment, the liquid pharmaceutical composition of the present invention comprises an acetate buffer in a concentration of 10 mM and with a pH of 5.8, 5 mM L-methionine and 30 mM L-arginine.

[0135] In one embodiment, the liquid pharmaceutical composition of the present invention comprises an acetate buffer in a concentration of 10 mM and with a pH of 5.8, polysorbate 20 in a concentration of 0.02% (w/v), 5 mM L-methionine and 30 mM L-arginine.

[0136] In one embodiment, the liquid pharmaceutical composition of the present invention comprises an acetate buffer in a concentration of 10 mM and with a pH of 5.8, polysorbate 20 in a concentration of 0.02% (w/v), trehalose in a concentration of 250 mM, 5 mM L-methionine and 30 mM L-arginine.

[0137] In one embodiment, the liquid pharmaceutical composition of the present invention comprises a histidine buffer in a concentration of 10 mM and with a pH of 6.0 and 5 mM L-methionine.

[0138] In one embodiment, the liquid pharmaceutical composition of the present invention comprises a histidine buffer in a concentration of 10 mM and with a pH of 6.0 and 30 mM L-arginine.

[0139] In one embodiment, the liquid pharmaceutical composition of the present invention comprises a histidine buffer in a concentration of 10 mM and with a pH of 6.0, polysorbate 20 in a concentration of 0.02% (w/v) and 5 mM L-methionine.

[0140] In one embodiment, the liquid pharmaceutical composition of the present invention comprises a histidine buffer in a concentration of 10 mM and with a pH of 6.0, polysorbate 20 in a concentration of 0.02% (w/v) and 30 mM L-arginine.

[0141] A “fusion protein” is a protein which is formed by at least two polypeptide parts which are not naturally linked with each other. The two polypeptide parts are linked by a peptide bond and optionally a linker molecule is inserted between the two polypeptide parts. The two polypeptide parts are transcribed and translated as a single molecule. The fusion protein typically has functionalities derived from both polypeptide parts. In the context of the present invention, the fusion protein retains the binding properties of ACE2, in particular the binding of viruses such as coronaviruses, and the increased half-life and Fc receptor binding conferred by the Fc portion of human IgG1 or human IgG4.

[0142] The term “human ACE2” refers to angiotensin converting enzyme 2 derived from a human subject. The full-length sequence of human ACE2 has 805 amino acids. It comprises a signal peptide, an N-terminal extracellular peptidase domain followed by a collectrin-like domain, a single transmembrane helix and a short intracellular segment. The full-length sequence of human ACE2 is depicted in SEQ ID No.1. Unless indicated otherwise, the amino acid numbering used herein refers to the numbering of the full-length sequence of human ACE2 according to SEQ ID No. 1. The extracellular domain of human ACE2 consists of the amino acids 18 to 740 of SEQ ID No. 1 and is shown in SEQ ID No. 3. The signal peptide is depicted in SEQ ID No. 15.

[0143] The term “fragment of human ACE2” refers to a polypeptide which lacks one or more amino acids compared to the full-length sequence of human ACE2 according to SEQ ID No.1. The fragment of human ACE2 is capable of binding to the S protein of at least one coronavirus, in particular to the S protein of SARS-CoV-2. The binding of a fragment of human ACE2 to the S protein of at least one coronavirus can be determined in an ELISA assay in which the S protein is immobilized on a substrate and contacted with the fragment of human ACE2 and the interaction between the S protein and the fragment of human ACE2 is detected. Alternatively, the binding of a fragment of human ACE2 to the S protein of at least one coronavirus can be determined by surface plasmon resonance, e.g. as described in Shang et al. (2020) Nature doi: 10.1038/s41586-020-2179-y; Wrapp et al. (2020) Science 367(6483): 1260-1263; Lei et al. (2020) Nature Communications 11(1): 2070. In a further alternative, the binding of a fragment of human ACE2 to the S protein of at least one coronavirus can be determined by biolayer interferometry, e.g. as described in Seydoux et al. (2020) https://doi.org/10.1101/2020.05.12.091298.

[0144] In one embodiment, the fragment of human ACE2 consists of 360 to 723 contiguous amino acids within the sequence according to SEQ ID No. 1. Preferably, the fragment of human ACE2 consists of 380 to 723, 400 to 723, 420 to 723, 440 to 723, 460 to 723, 480 to 723 or 500 to 723 contiguous amino acids within the sequence according to SEQ ID No. 1. Preferably, the fragment of human ACE2 consists of 520 to 723, 540 to 723, 560 to 723, 580 to 723 or 600 to 723 contiguous amino acids within the sequence according to SEQ ID No. 1. More preferably, the fragment of human ACE2 consists of 620 to 723, 640 to 723, 660 to 723, 680 to 723, 700 to 723 or 720 to 723 contiguous amino acids within the sequence according to SEQ ID No. 1.

[0145] In one embodiment, the fragment of human ACE2 comprises the amino acid residues K31 and K353, the numbering referring to SEQ ID No. 1. In one embodiment, the fragment of human ACE2 comprises the amino acid residues Q24, D30, E35 and Q42, the numbering referring to SEQ ID No.1. In one embodiment, the fragment of human ACE2 comprises the amino acid residues Q24, D30, K31, E35, Q42 and K353, the numbering referring to SEQ ID No.1.

[0146] In one embodiment, the fragment of human ACE2 consists of 360 to 723 contiguous amino acids within the sequence according to SEQ ID No. 1 and comprises the amino acid residues K31 and K353, the numbering referring to SEQ ID No. 1. Preferably, the fragment of human ACE2 consists of 380 to 723, 400 to 723, 420 to 723, 440 to 723, 460 to 723, 480 to 723 or 500 to 723 contiguous amino acids within the sequence according to SEQ ID No. 1 and comprises the amino acid residues K31 and K353, the numbering referring to SEQ ID No. 1. Preferably, the fragment of human ACE2 consists of 520 to 723, 540 to 723, 560 to 723, 580 to 723 or 600 to 723 contiguous amino acids within the sequence according to SEQ ID No. 1 and comprises the amino acid residues K31 and K353, the numbering referring to SEQ ID No. 1. More preferably, the fragment of human ACE2 consists of 620 to 723, 640 to 723, 660 to 723, 680 to 723, 700 to 723 or 720 to 723 contiguous amino acids within the sequence according to SEQ ID No. 1 and comprises the amino acid residues K31 and K353, the numbering referring to SEQ ID No. 1.

[0147] In one embodiment, the fragment of human ACE2 consists of 360 to 723 contiguous amino acids within the sequence according to SEQ ID No. 1 and comprises the amino acid residues Q24, D30, E35 and Q42, the numbering referring to SEQ ID No. 1. Preferably, the fragment of human ACE2 consists of 380 to 723, 400 to 723, 420 to 723, 440 to 723, 460 to 723, 480 to 723 or 500 to 723 contiguous amino acids within the sequence according to SEQ ID No. 1 and comprises the amino acid residues Q24, D30, E35 and Q42, the numbering referring to SEQ ID No. 1. Preferably, the fragment of human ACE2 consists of 520 to 723, 540 to 723, 560 to 723, 580 to 723 or 600 to 723 contiguous amino acids within the sequence according to SEQ ID No. 1 and comprises the amino acid residues Q24, D30, E35 and Q42, the numbering referring to SEQ ID No. 1. More preferably, the fragment of human ACE2 consists of 620 to 723, 640 to 723, 660 to 723, 680 to 723, 700 to 723 or 720 to 723 contiguous amino acids within the sequence according to SEQ ID No. 1 and comprises the amino acid residues Q24, D30, E35 and Q42, the numbering referring to SEQ ID No. 1.

[0148] In one embodiment, the fragment of human ACE2 consists of 360 to 723 contiguous amino acids within the sequence according to SEQ ID No. 1 and comprises the amino acid residues Q24, D30, K31, E35, Q42 and K353, the numbering referring to SEQ ID No. 1.

[0149] Preferably, the fragment of human ACE2 consists of 380 to 723, 400 to 723, 420 to 723, 440 to 723, 460 to 723, 480 to 723 or 500 to 723 contiguous amino acids within the sequence according to SEQ ID No. 1 and comprises the amino acid residues Q24, D30, K31, E35, Q42 and K353, the numbering referring to SEQ ID No. 1. Preferably, the fragment of human ACE2 consists of 520 to 723, 540 to 723, 560 to 723, 580 to 723 or 600 to 723 contiguous amino acids within the sequence according to SEQ ID No. 1 and comprises the amino acid residues Q24, D30, K31, E35, Q42 and K353, the numbering referring to SEQ ID No. 1.

[0150] More preferably, the fragment of human ACE2 consists of 620 to 723, 640 to 723, 660 to 723, 680 to 723, 700 to 723 or 720 to 723 contiguous amino acids within the sequence according to SEQ ID No. 1 and comprises the amino acid residues Q24, D30, K31, E35, Q42 and K353, the numbering referring to SEQ ID No. 1.

[0151] In one embodiment, the fragment of human ACE2 consists of amino acids 18 to 380, 18 to 400, 18 to 420, 18 to 440, 18 to 460, 18 to 480 or 18 to 500 of the sequence according to SEQ ID No. 1. Preferably, the fragment of human ACE2 consists of amino acids 18 to 520, 18 to 540, 18 to 560, 18 to 580 or 18 to 600 of the sequence according to SEQ ID No. 1. More preferably, the fragment of human ACE2 consists of amino acids 18 to 605, 18 to 615, 18 to 620, 18 to 640, 18 to 660, 18 to 680 or 18 to 700 of the sequence according to SEQ ID No. 1. Even more preferably, the fragment of human ACE2 consists of amino acids 18 to 710, 18 to 720 or 18 to 730 of the sequence according to SEQ ID No. 1.

[0152] In one embodiment, the fragment of human ACE2 consists of the amino acid sequence according to SEQ ID No.2. The amino acid sequence according to SEQ ID No. 2 starts at amino acid Q18 and ends with amino acid G732 in the sequence according to SEQ ID No. 1. The amino acid glycine at the C-terminal end of this fragment provides a high rotational freedom which favours the fusion of the two protein parts and increases the stability of the fusion protein. Additionally, the use of an ACE2 fragment comprising the amino acid sequence which starts at amino acid Q18 and ends with amino acid G732 in the sequence according to SEQ ID No. 1 provides a better yield than a longer ACE2 fragment.

[0153] In one embodiment, the fragment of human ACE2 consists of the complete extracellular domain of human ACE2 which has the amino acid sequence according to SEQ ID No.3.

[0154] In one embodiment, the fragment of human ACE2 consists of the amino acid sequence according to SEQ ID No.16. The amino acid sequence according to SEQ ID No. 16 starts at amino acid Q18 and ends with amino acid G605 in the sequence according to SEQ ID No. 1.

[0155] In one embodiment, the fragment of human ACE2 is N-glycosylated at at least one amino acid residue selected from N53, N90, N103, N322, N432, N546 and N690, the numbering referring to SEQ ID No. 1. In one embodiment, the fragment of human ACE2 is N-glycosylated at amino acid residues N53, N90 and, N322, the numbering referring to SEQ ID No. 1. In one embodiment, the fragment of human ACE2 is N-glycosylated at amino acid residues N53, N90, N103, N322, N432, N546 and N690, the numbering referring to SEQ ID No. 1.

[0156] In one embodiment, the fragment of human ACE2 consists of the amino acid sequence according to SEQ ID No.2 and is N-glycosylated at at least one amino acid residue selected from N53, N90, N103, N322, N432, N546 and N690, the numbering referring to SEQ ID No. 1. In one embodiment, the fragment of human ACE2 consists of the amino acid sequence according to SEQ ID No.2 and is N-glycosylated at amino acid residues N53, N90 and N322, the numbering referring to SEQ ID No. 1. In one embodiment, the fragment of human ACE2 consists of the amino acid sequence according to SEQ ID No.2 and is N-glycosylated at amino acid residues N53, N90, N103, N322, N432, N546 and N690, the numbering referring to SEQ ID No. 1.

[0157] In one embodiment, the fragment of human ACE2 consists of the amino acid sequence according to SEQ ID No.3 and is N-glycosylated at at least one amino acid residue selected from N53, N90, N103, N322, N432, N546 and N690, the numbering referring to SEQ ID No. 1. In one embodiment, the fragment of human ACE2 consists of the amino acid sequence according to SEQ ID No.3 and is N-glycosylated at amino acid residues N53, N90 and N322, the numbering referring to SEQ ID No. 1. In one embodiment, the fragment of human ACE2 consists of the amino acid sequence according to SEQ ID No.3 and is N-glycosylated at amino acid residues N53, N90, N103, N322, N432, N546 and N690, the numbering referring to SEQ ID No. 1.

[0158] The term “N-glycosylated” or “N-glycosylation” means that a glycan structure is attached to the amide nitrogen of an asparagine residue of a protein. A glycan is a branched, flexible chain of carbohydrates and the exact structure of the glycan attached to the asparagine residue of a protein depends on the expression system used for glycoprotein production.

[0159] In one embodiment, 70% to 95%, preferably 73% to 92% and most preferably 75% to 90% of the N-glycans on the ACE2 protein have at least one sialic acid molecule attached to the N-glycan, meaning that one terminal galactose molecule is linked to a sialic acid molecule. The sialic acid molecule is attached to the terminal galactose residues of the glycan structure. In one embodiment, 35% to 60% preferably 38% to 55% and most preferably 40% to 50% of the N-glycans on the ACE2 protein have at least two two sialic acid molecules attached to the N-glycan, meaning that two terminal galactose molecules are linked to a sialic acid molecule. In one embodiment, 1% to 10%, preferably 2% to 9%, more preferably 3% to 8% and most preferably 5% to 8% of the N-glycans on the ACE2 protein have at least three sialic acid molecules attached to the N-glycan, meaning that three terminal galactose molecules are linked to a sialic acid molecule. In one embodiment, 0% to 4%, preferably 0.5% to 3%, more preferably 0.8% to 2.5% and most preferably 1% to 2% of the N-glycans on the ACE2 protein have at least four sialic acid molecules attached to the N-glycans, meaning that four terminal galactose molecules are linked to a sialic acid molecule.

[0160] In one embodiment, amino acid residues N53, N90, N103, N322, N432, N546 and N690, the numbering referring to SEQ ID NO: 1, are N-glycosylated and 70% to 95%, preferably 73% to 92% and most preferably 75% to 90% of the N-glycans attached to said amino acid residues have at least one sialic acid molecule attached to the N-glycan, meaning that one terminal galactose molecule is linked to a sialic acid molecule. In one embodiment, amino acid residues N53, N90, N103, N322, N432, N546 and N690, the numbering referring to SEQ ID NO: 1, are N-glycosylated and 35% to 60% preferably 38% to 55% and most preferably 40% to 50% of the N-glycans on the ACE2 protein have at least two sialic acid molecules attached to the N-glycan, meaning that two terminal galactose molecules are linked to a sialic acid molecule. In one embodiment, amino acid residues N53, N90, N103, N322, N432, N546 and N690, the numbering referring to SEQ ID NO: 1, are N-glycosylated and 1% to 10%, preferably 2% to 9%, more preferably 3% to 8% and most preferably 5% to 8% of the N-glycans on the ACE2 protein have at least three sialic acid molecules attached to the N-glycan, meaning that three terminal galactose molecules are linked to a sialic acid molecule. In one embodiment, amino acid residues N53, N90, N103, N322, N432, N546 and N690, the numbering referring to SEQ ID NO: 1, are N-glycosylated and 0% to 4%, preferably 0.5% to 3%, more preferably 0.8% to 2.5% and most preferably 1% to 2% of the N-glycans on the ACE2 protein have at least four sialic acid molecules attached to the N-glycans, meaning that four terminal galactose molecules are linked to a sialic acid molecule.

[0161] The glycoprotein structure can be analyzed by different methods known to the skilled person, including digestion of the fusion protein and analysis by peptide mapping. Alternatively, hydrophilic interaction liquid chromatography (HILIC) may be performed for glycoprotein analysis.

[0162] An increased sialylation leads to an increased half-life of a therapeutic protein (see e.g., Byrne et al. (2007) Drug Discovery Today 12 (7-8): 319-326; Jones et al. (2007) Glycobiology 17(5): 529-540).

[0163] The sialylation may be increased by culturing the host cells expressing the fusion protein under specific conditions which increase sialylation. For example, a eukaryotic host cell comprising a recombinant nucleic acid molecule encoding said fusion protein may be cultured in a medium supplemented with one or more of a manganese salt, N-acetylmannosamine or a derivative thereof, galactose, glucosamine or a derivative thereof and DMSO.

[0164] It has been shown that the above cell culture additives enhance sialylation of proteins produced in eukaryotic host cells (see, e.g., Liu et al. (2015) World J. Microbiol. Biotechnol. 31(7): 1147-1156; Crowell et al. (2007) Biotechnol. Bioeng. 96(3): 538-549; Lee et al. (2017) Biotechnol. Bioeng. 114(9): 1991-2000); WO 2011/061275; WO 2004/008100).

[0165] The sialylation may be increased by culturing the eukaryotic host cell comprising a recombinant nucleic acid molecule encoding said fusion protein in a medium supplemented with 20 to 80 μM of a manganese salt, preferably with 25 to 70 μM of a manganese salt, more preferably with 30 μM to 60 μM of a manganese salt and most preferably with 40 μM of a manganese salt. The sialylation may be increased by culturing the eukaryotic host cell comprising a recombinant nucleic acid molecule encoding said fusion protein in a medium supplemented with 20 to 80 μM of manganese chloride, preferably with 25 to 70 μM of manganese chloride, more preferably with 30 μM to 60 μM of manganese chloride and most preferably with 40 μM of manganese chloride.

[0166] The sialylation may be increased by culturing the eukaryotic host cell comprising a recombinant nucleic acid molecule encoding said fusion protein in a medium supplemented with 5 to 30 mM N-acetylmannosamine, preferably with 6 to 25 mM N-acetylmannosamine, more preferably with 8 to 20 mM N-acetylmannosamine and most preferably with 10 mM N-acetylmannosamine.

[0167] The sialylation may be increased by culturing the eukaryotic host cell comprising a recombinant nucleic acid molecule encoding said fusion protein in a medium supplemented with 20 to 80 μM of a manganese salt and 5 to 30 mM N-acetylmannosamine, preferably with 25 to 70 μM of a manganese salt and 6 to 25 mM N-acetylmannosamine, more preferably with 30 μM to 60 μM of a manganese salt and 8 to 20 mM N-acetylmannosamine and most preferably with 40 μM of a manganese salt and 10 mM N-acetylmannosamine. The sialylation may be increased by culturing the eukaryotic host cell comprising a recombinant nucleic acid molecule encoding said fusion protein in a medium supplemented with 20 to 80 μM of manganese chloride and 5 to 30 mM N-acetylmannosamine, preferably with 25 to 70 μM of manganese chloride and 6 to 25 mM N-acetylmannosamine, more preferably with 30 μM to 60 μM of manganese chloride and 8 to 20 mM N-acetylmannosamine and most preferably with 40 μM of manganese chloride and 10 mM N-acetylmannosamine.

[0168] As used herein, the term “sialylation” refers to the addition of a sialic acid residue to a protein, including a glycoprotein. Sialic acid is a common name for a family of unique nine-carbon monosaccharides, which can be linked to other oligosaccharides. Two family members are N-acetyl neuraminic acid, abbreviated as Neu5Ac or NANA, and N-glycolyl neuraminic acid, abbreviated as Neu5Gc or NGNA. The most common form of sialic acid in humans is NANA.

[0169] A “variant” of the fragment of human ACE2 refers to a fragment as defined above, wherein compared to the corresponding sequence in the amino acid sequence of wild-type, full-length human ACE2 according to SEQ ID No. 1 at least one amino acid residue is different or at least two, at least three, at least four, at least five, at least six, at least seven, at least eight, at least nine, at least ten, at least eleven or at least thirteen amino acids are different. The “variant” of the fragment of human ACE2 comprises one or more amino acid substitutions in the sequence of the fragment of human ACE2. A “variant” of the fragment of human ACE2 does not comprise any amino acid additions or deletions compared to the sequence from which the variant is derived. In one embodiment, the variant the fragment of human ACE2 is a variant of the fragment of human ACE2 according to SEQ ID NO: 2 or 3 and does not comprise any amino acid additions or deletions compared to the sequence according to SEQ ID NO: 2 or 3, i.e. it has the same length as the sequence according to SEQ ID NO: 2 or 3. As used herein, a variant of the fragment of human ACE2 is capable of binding to the S protein of at least one coronavirus, in particular to the S protein of SARS-CoV-2. The binding of a variant of the fragment of human ACE2 to the S protein of at least one coronavirus, in particular to the S protein of SARS-CoV-2, can be determined as described above for fragments of human ACE2.

[0170] In one embodiment, the variant of the fragment of human ACE2 differs from the corresponding amino acid sequence in the sequence according to SEQ ID No. 1 by one amino acid. In another embodiment, the variant of the fragment of human ACE2 differs from the corresponding amino acid sequence in the sequence according to SEQ ID No. 1 by two amino acids. In still another embodiment, the variant of the fragment of human ACE2 differs from the corresponding amino acid sequence in the sequence according to SEQ ID No. 1 by three amino acids. In still another embodiment, the variant of the fragment of human ACE2 differs from the corresponding amino acid sequence in the sequence according to SEQ ID No. 1 by four amino acids. In still another embodiment, the variant of the fragment of human ACE2 differs from the corresponding amino acid sequence in the sequence according to SEQ ID No. 1 by five amino acids. In still another embodiment, the variant of the fragment of human ACE2 differs from the corresponding amino acid sequence in the sequence according to SEQ ID No. 1 by six amino acids. In still another embodiment, the variant of the fragment of human ACE2 differs from the corresponding amino acid sequence in the sequence according to SEQ ID No. 1 by seven amino acids. In still another embodiment, the variant of the fragment of human ACE2 differs from the corresponding amino acid sequence in the sequence according to SEQ ID No. 1 by eight amino acids. In still another embodiment, the variant of the fragment of human ACE2 differs from the corresponding amino acid sequence in the sequence according to SEQ ID No. 1 by nine amino acids. In still another embodiment, the variant of the fragment of human ACE2 differs from the corresponding amino acid sequence in the sequence according to SEQ ID No. 1 by ten amino acids. In still another embodiment, the variant of the fragment of human ACE2 differs from the corresponding amino acid sequence in the sequence according to SEQ ID No. 1 by eleven amino acids. In still another embodiment, the variant of the fragment of human ACE2 differs from the corresponding amino acid sequence in the sequence according to SEQ ID No. 1 by twelve amino acids. In still another embodiment, the variant of the fragment of human ACE2 differs from the corresponding amino acid sequence in the sequence according to SEQ ID No. 1 by thirteen amino acids.

[0171] In one embodiment, the variant of the fragment of human ACE2 differs from the corresponding amino acid sequence in the sequence according to SEQ ID No. 1 by one to thirteen amino acids. In one embodiment, the variant of the fragment of human ACE2 differs from the corresponding amino acid sequence in the sequence according to SEQ ID No. 1 by one to ten amino acids. In one embodiment, the variant of the fragment of human ACE2 differs from the corresponding amino acid sequence in the sequence according to SEQ ID No. 1 by one to eight amino acids. In one embodiment, the variant of the fragment of human ACE2 differs from the corresponding amino acid sequence in the sequence according to SEQ ID No. 1 by one to seven amino acids. In one embodiment, the variant of the fragment of human ACE2 differs from the corresponding amino acid sequence in the sequence according to SEQ ID No. 1 by one to six amino acids. In one embodiment, the variant of the fragment of human ACE2 differs from the corresponding amino acid sequence in the sequence according to SEQ ID No. 1 by one to five amino acids. In one embodiment, the variant of the fragment of human ACE2 differs from the corresponding amino acid sequence in the sequence according to SEQ ID No. 1 by one to four amino acids. In one embodiment, the variant of the fragment of human ACE2 differs from the corresponding amino acid sequence in the sequence according to SEQ ID No. 1 by one to three amino acids. In one embodiment, the variant of the fragment of human ACE2 differs from the corresponding amino acid sequence in the sequence according to SEQ ID No. 1 by one or two amino acids.

[0172] One variant of the fragment of human ACE2 may be an enzymatically inactive variant. “The enzymatically inactive variant of the fragment of human ACE2” lacks the ability to cleave angiotensin II to Ang1-7. The enzymatic activity of human ACE2 can be determined by methods known to the skilled person. Suitable kits for determining the enzymatic activity of human ACE2 are commercially available, for example from the companies BioVision or Anaspec. By using an enzymatically inactive ACE2 variant any side effects associated with the enzymatic activity of ACE2 such as effects on the cardiovascular system or the regulation of blood pressure are eliminated. Further, the risk of counterbalancing the RAS-MAS equilibrium is reduced.

[0173] The enzymatically inactive variant of the fragment of human ACE2 may comprise one or more mutations of amino acids within the catalytic centre of ACE2. In particular, the enzymatically inactive variant of the fragment of human ACE2 comprises a mutation of the wildtype histidine at residue 374 of the sequence according to SEQ ID No. 1 and/or a mutation of the wildtype histidine at residue 378 of the sequence according to SEQ ID No. 1.

[0174] The wild-type histidine may be mutated to any amino acid other than histidine and particularly, the wild-type histidine is mutated to asparagine. Preferably, the enzymatically inactive variant of the fragment of human ACE2 comprises a H374N and a H378N mutation, the numbering referring to the sequence according to SEQ ID No. 1.

[0175] In another embodiment, the enzymatically inactive variant of the fragment of human ACE2 comprises a mutation at one or more of the following amino acid residues, the numbering referring to the sequence according to SEQ ID No. 1: residue 345 (histidine in wild-type), 273 (arginine in wild-type), 402 (glutamic acid in wild-type) and 505 (histidine in wild-type). In one embodiment, the enzymatically inactive variant of the fragment of human ACE2 comprises a mutation of histidine at residue 345 to alanine or leucine, a mutation of arginine at residue 273 to alanine, glutamine or lysine, a mutation of glutamic acid at residue 402 to alanine and/or a mutation of histidine at residue 505 to alanine or leucine, the numbering referring to the sequence according to SEQ ID No. 1. In a particular embodiment, the enzymatically inactive variant of the fragment of human ACE2 comprises a mutation of arginine at residue 273 to alanine (also called R273A mutation), the numbering referring to the sequence according to SEQ ID No. 1. It was found that arginine 273 is critical for substrate binding and that its substitution abolishes enzymatic activity (Guy et al. (2005) FEBS J. 272(14): 3512-3520).

[0176] In one embodiment, the fragment of human ACE2 consists of amino acids 18 to 380, 18 to 400, 18 to 420, 18 to 440, 18 to 460, 18 to 480 or 18 to 500 of the sequence according to SEQ ID No. 1 and comprises a H374N and a H378N mutation, the numbering referring to the sequence according to SEQ ID No. 1. Preferably, the fragment of human ACE2 consists of amino acids 18 to 520, 18 to 540, 18 to 560, 18 to 580 or 18 to 600 of the sequence according to SEQ ID No. 1 and comprises a H374N and a H378N mutation, the numbering referring to the sequence according to SEQ ID No. 1. More preferably, the fragment of human ACE2 consists of amino acids 18 to 615, 18 to 620, 18 to 640, 18 to 660, 18 to 680 or 18 to 700 of the sequence according to SEQ ID No. 1 and comprises a H374N and a H378N mutation, the numbering referring to the sequence according to SEQ ID No. 1. Even more preferably, the fragment of human ACE2 consists of amino acids 18 to 710, 18 to 720 or 18 to 730 of the sequence according to SEQ ID No. 1 and comprises a H374N and a H378N mutation, the numbering referring to the sequence according to SEQ ID No. 1.

[0177] In one embodiment, the fragment of human ACE2 consists of the sequence according to SEQ ID No. 2 and comprises a H374N and a H378N mutation. In one embodiment, the fragment of human ACE2 consists of the sequence according to SEQ ID No. 3 and comprises a H374N and a H378N mutation. In one embodiment, the variant of the fragment of human ACE2 consists of a protein having the amino acid sequence according to SEQ ID NO: 24. In one embodiment, the variant of the fragment of human ACE2 consists of a protein having the amino acid sequence according to SEQ ID NO: 25.

[0178] In one embodiment, the fragment of human ACE2 consists of amino acids 18 to 380, 18 to 400, 18 to 420, 18 to 440, 18 to 460, 18 to 480 or 18 to 500 of the sequence according to SEQ ID No. 1 and comprises a R273A mutation, the numbering referring to the sequence according to SEQ ID No. 1. Preferably, the fragment of human ACE2 consists of amino acids 18 to 520, 18 to 540, 18 to 560, 18 to 580 or 18 to 600 of the sequence according to SEQ ID No. 1 and comprises a R273A mutation, the numbering referring to the sequence according to SEQ ID No. 1. More preferably, the fragment of human ACE2 consists of amino acids 18 to 615, 18 to 620, 18 to 640, 18 to 660, 18 to 680 or 18 to 700 of the sequence according to SEQ ID No. 1 and comprises a R273A mutation, the numbering referring to the sequence according to SEQ ID No. 1. Even more preferably, the fragment of human ACE2 consists of amino acids 18 to 710, 18 to 720 or 18 to 730 of the sequence according to SEQ ID No. 1 and comprises a R273A mutation, the numbering referring to the sequence according to SEQ ID No. 1.

[0179] In one embodiment, the fragment of human ACE2 consists of a protein having the amino acid sequence according to SEQ ID NO: 2 and comprises a R273A mutation, the numbering referring to the sequence according to SEQ ID No. 1. In one embodiment, the fragment of human ACE2 consists of a protein having the amino acid sequence according to SEQ ID NO: 3 and comprises a R273A mutation, the numbering referring to the sequence according to SEQ ID No. 1. In one embodiment, the variant of the fragment of human ACE2 consists of a protein having the amino acid sequence according to SEQ ID NO: 42. In one embodiment, the variant of the fragment of human ACE2 consists of a protein having the amino acid sequence according to SEQ ID NO: 43.

[0180] Another variant of the fragment of human ACE2 may be a variant which inhibits shedding of ACE2. It was shown that ACE2 is shed from human airway epithelia by cleavage of the ACE2 ectodomain and that ADAM17 regulates ACE2 cleavage. Further, a point mutation at leucine 584 of full-length ACE2 which is located in the ectodomain of ACE2 abolished shedding (Jia et al. (2009) Am. J. Physiol. Lung Cell. Mol. Physiol. 297(1): L84-96). Hence, in one embodiment the variant of the fragment of human ACE2 comprises a mutation at leucine 584, the numbering referring to the sequence according to SEQ ID No.1. In one embodiment the mutation at leucine 584 is a L584A mutation.

[0181] In one embodiment, the fragment of human ACE2 consists of the sequence according to SEQ ID No. 2 and comprises a L584A mutation, the numbering referring to the sequence according to SEQ ID No. 1.

[0182] In one embodiment, the fragment of human ACE2 consists of the sequence according to SEQ ID No. 3 and comprises a L584A mutation, the numbering referring to the sequence according to SEQ ID No. 1.

[0183] In one embodiment, the variant of the fragment of human ACE2 comprises a H374N mutation, a H378N mutation and a L584A mutation, the numbering referring to the sequence according to SEQ ID No. 1.

[0184] In one embodiment, the fragment of human ACE2 consists of the sequence according to SEQ ID No. 2 and comprises a H374N mutation, a H378N mutation and a L584A mutation, the numbering referring to the sequence according to SEQ ID No. 1.

[0185] In one embodiment, the fragment of human ACE2 consists of the sequence according to SEQ ID No. 3 and comprises a H374N mutation, a H378N mutation and a L584A mutation, the numbering referring to the sequence according to SEQ ID No. 1.

[0186] Another variant of the fragment of human ACE2 may be a variant which inhibits cleavage of ACE2 by the protease TMPRSS2. It was shown that ACE2 proteolysis by TMPRSS2 augments entry of SARS-CoV (Heurich et al. (2014) J. Virol. 88(2): 1293-1307). TMPRSS2 also plays a role in the entry of SARS-CoV-2 into the cells (Hoffmann et al. (2020) Cell 181: 1-10). To abolish cleavage of ACE2 by TMPRSS2, the amino acid residues essential for the cleavage may be mutated. It was shown that arginine and lysine residues within the amino acid region spanning amino acids 697 to 716 of ACE2 are essential for ACE2 cleavage by TMPRSS2 (Heurich et al. (2014) J. Virol. 88(2): 1293-1307). Hence, in one embodiment the variant of the fragment of human ACE2 comprises a mutation at at least one residue selected from amino acids 697, 702, 705, 708, 710 and 716, the numbering referring to SEQ ID No. 1. Preferably, the variant of the fragment of human ACE2 comprises a mutation at at least two or three residues selected from amino acids 697, 702, 705, 708, 710 and 716, the numbering referring to SEQ ID No. 1. More preferably, the variant of the fragment of human ACE2 comprises a mutation at at least four or five residues selected from amino acids 697, 702, 705, 708, 710 and 716, the numbering referring to SEQ ID No. 1. Most preferably, the variant of the fragment of human ACE2 comprises a mutation at residues 697, 702, 705, 708, 710 and 716, the numbering referring to SEQ ID No. 1. The wild-type amino acid residue at any of these residues may be mutated to any other amino acid and particularly, the wild-type amino acid residue is mutated to alanine.

[0187] In one embodiment, the variant of the fragment of human ACE2 comprises at least one of the following mutations: R697A, K702A, R705A, R708A, R710A and R716A, the numbering referring to SEQ ID No. 1. Preferably, the variant of the fragment of human ACE2 comprises at least two or three of the following mutations: R697A, K702A, R705A, R708A, R710A and R716A, the numbering referring to SEQ ID No. 1. More preferably, the variant of the fragment of human ACE2 comprises at least four or five of the following mutations: R697A, K702A, R705A, R708A, R710A and R716A, the numbering referring to SEQ ID No. 1. Most preferably, the variant of the fragment of human ACE2 comprises the following mutations: R697A, K702A, R705A, R708A, R710A and R716A, the numbering referring to SEQ ID No. 1.

[0188] The variant of the fragment of human ACE2 may further comprise mutations at residues 619, 621 and/or 625, the numbering referring to SEQ ID No. 1. In particular, the variant of the fragment of human ACE2 may further comprise the following mutations: K619A, R621A and/or K625A, the numbering referring to SEQ ID No. 1.

[0189] Hence, in one embodiment, the variant of the fragment of human ACE2 comprises the following mutations: K619A, R621A, K625A, R697A, K702A, R705A, R708A, R710A and R716A, the numbering referring to SEQ ID No. 1.

[0190] In one embodiment, the fragment of human ACE2 consists of the sequence according to SEQ ID No. 2 and comprises a mutation at at least one residue selected from amino acids 697, 702, 705, 708, 710 and 716, the numbering referring to SEQ ID No. 1. In one embodiment, the fragment of human ACE2 consists of the sequence according to SEQ ID No. 2 and comprises a mutation at residues 697, 702, 705, 708, 710 and 716, the numbering referring to SEQ ID No. 1. In one embodiment, the fragment of human ACE2 consists of the sequence according to SEQ ID No. 2 and comprises at least one of the following mutations: R697A, K702A, R705A, R708A, R710A and R716A, the numbering referring to SEQ ID No. 1. In one embodiment, the fragment of human ACE2 consists of the sequence according to SEQ ID No. 2 and comprises the following mutations: R697A, K702A, R705A, R708A, R710A and R716A, the numbering referring to SEQ ID No. 1.

[0191] In one embodiment, the fragment of human ACE2 consists of the sequence according to SEQ ID No. 3 and comprises a mutation at at least one residue selected from amino acids 697, 702, 705, 708, 710 and 716, the numbering referring to SEQ ID No. 1. In one embodiment, the fragment of human ACE2 consists of the sequence according to SEQ ID No. 3 and comprises a mutation at residues 697, 702, 705, 708, 710 and 716, the numbering referring to SEQ ID No. 1. In one embodiment, the fragment of human ACE2 consists of the sequence according to SEQ ID No. 3 and comprises at least one of the following mutations: R697A, K702A, R705A, R708A, R710A and R716A, the numbering referring to SEQ ID No. 1. In one embodiment, the fragment of human ACE2 consists of the sequence according to SEQ ID No. 3 and comprises the following mutations: R697A, K702A, R705A, R708A, R710A and R716A, the numbering referring to SEQ ID No. 1.

[0192] In one embodiment, the fragment of human ACE2 consists of the sequence according to SEQ ID No. 2 and comprises a H374N mutation, a H378N mutation, a L584A mutation and the following mutations: R697A, K702A, R705A, R708A, R710A and R716A, the numbering referring to the sequence according to SEQ ID No. 1.

[0193] In one embodiment, the fragment of human ACE2 consists of the sequence according to SEQ ID No. 3 and comprises a H374N mutation, a H378N mutation, a L584A mutation and the following mutations: R697A, K702A, R705A, R708A, R710A and R716A, the numbering referring to the sequence according to SEQ ID No. 1.

[0194] In one embodiment, the fragment of human ACE2 consists of the sequence according to SEQ ID No. 2 and comprises a mutation at at least one residue selected from amino acids 619, 621, 625, 697, 702, 705, 708, 710 and 716, the numbering referring to SEQ ID No. 1. In one embodiment, the fragment of human ACE2 consists of the sequence according to SEQ ID No. 2 and comprises a mutation at residues 619, 621, 625, 697, 702, 705, 708, 710 and 716, the numbering referring to SEQ ID No. 1. In one embodiment, the fragment of human ACE2 consists of the sequence according to SEQ ID No. 2 and comprises at least one of the following mutations: K619A, R621A, K625A, R697A, K702A, R705A, R708A, R710A and R716A, the numbering referring to SEQ ID No. 1. In one embodiment, the fragment of human ACE2 consists of the sequence according to SEQ ID No. 2 and comprises the following mutations: K619A, R621A, K625A, R697A, K702A, R705A, R708A, R710A and R716A, the numbering referring to SEQ ID No. 1.

[0195] In one embodiment, the fragment of human ACE2 consists of the sequence according to SEQ ID No. 3 and comprises a mutation at at least one residue selected from amino acids 619, 621, 625, 697, 702, 705, 708, 710 and 716, the numbering referring to SEQ ID No. 1. In one embodiment, the fragment of human ACE2 consists of the sequence according to SEQ ID No. 3 and comprises a mutation at residues 619, 621, 625, 697, 702, 705, 708, 710 and 716, the numbering referring to SEQ ID No. 1. In one embodiment, the fragment of human ACE2 consists of the sequence according to SEQ ID No. 3 and comprises at least one of the following mutations: K619A, R621A, K625A, R697A, K702A, R705A, R708A, R710A and R716A, the numbering referring to SEQ ID No. 1. In one embodiment, the fragment of human ACE2 consists of the sequence according to SEQ ID No. 3 and comprises the following mutations: K619A, R621A, K625A, R697A, K702A, R705A, R708A, R710A and R716A, the numbering referring to SEQ ID No. 1.

[0196] In one embodiment, the fragment of human ACE2 consists of the sequence according to SEQ ID No. 2 and comprises a H374N mutation, a H378N mutation, a L584A mutation and the following mutations: K619A, R621A, K625A, R697A, K702A, R705A, R708A, R710A and R716A, the numbering referring to the sequence according to SEQ ID No. 1.

[0197] In one embodiment, the fragment of human ACE2 consists of the sequence according to SEQ ID No. 3 and comprises a H374N mutation, a H378N mutation, a L584A mutation and the following mutations: K619A, R621A, K625A, R697A, K702A, R705A, R708A, R710A and R716A, the numbering referring to the sequence according to SEQ ID No. 1.

[0198] Another variant of the fragment of human ACE2 may be a variant which provides an additional cysteine for the formation of disulfide bridges between two ACE2 molecules. The disulfide bridge increases the intrinsic stability of the fusion protein and may also have an effect on the binding of the fusion protein to its target. The additional cysteine may be provided by a substitution of serine 645 in the numbering of SEQ ID NO. 1 with cysteine.

[0199] Hence, in one embodiment, the variant of the fragment of human ACE2 comprises a S645C mutation, the numbering referring to SEQ ID No. 1.

[0200] In one embodiment, the fragment of human ACE2 consists of the sequence according to SEQ ID No. 2 and comprises a S645C mutation, the numbering referring to SEQ ID No. 1. In one embodiment, the variant of the fragment of human ACE2 consists of a protein having the amino acid sequence according to SEQ ID NO: 56.

[0201] In one embodiment, the fragment of human ACE2 consists of the sequence according to SEQ ID No. 3 and comprises a S645C mutation, the numbering referring to SEQ ID No. 1. In one embodiment, the variant of the fragment of human ACE2 consists of a protein having the amino acid sequence according to SEQ ID NO: 57.

[0202] In one embodiment, the fragment of human ACE2 consists of a protein having the amino acid sequence according to SEQ ID NO: 2 and comprises a H374N mutation, a H378N mutation, and a S645C mutation, the numbering referring to SEQ ID NO: 1. In one embodiment, the variant of the fragment of human ACE2 consists of a protein having the amino acid sequence according to SEQ ID NO: 70.

[0203] In one embodiment, the fragment of human ACE2 consists of a protein having the amino acid sequence according to SEQ ID NO: 3 and comprises a H374N mutation, a H378N mutation, and a S645C mutation, the numbering referring to SEQ ID NO: 1. In one embodiment, the variant of the fragment of human ACE2 consists of a protein having the amino acid sequence according to SEQ ID NO: 71.

[0204] In one embodiment, the fragment of human ACE2 consists of a protein having the amino acid sequence according to SEQ ID NO: 2 and comprises a R273A mutation, and a S645C mutation, the numbering referring to SEQ ID NO: 1. In one embodiment, the variant of the fragment of human ACE2 consists of a protein having the amino acid sequence according to SEQ ID NO: 84.

[0205] In one embodiment, the fragment of human ACE2 consists of a protein having the amino acid sequence according to SEQ ID NO: 3 and comprises a R273A mutation and a S645C mutation, the numbering referring to SEQ ID NO: 1. In one embodiment, the variant of the fragment of human ACE2 consists of a protein having the amino acid sequence according to SEQ ID NO: 85.

[0206] In one embodiment, the fragment of human ACE2 consists of the sequence according to SEQ ID No. 2 and comprises a H374N mutation, a H378N mutation, a L584A mutation and a S645C mutation, the numbering referring to SEQ ID No. 1.

[0207] In one embodiment, the fragment of human ACE2 consists of the sequence according to SEQ ID No. 3 and comprises a H374N mutation, a H378N mutation, a L584A mutation and a S645C mutation, the numbering referring to SEQ ID No. 1.

[0208] Another variant of the fragment of human ACE2 may be a variant which inhibits dimerization. Hence, in one embodiment the variant of the fragment of human ACE2 comprises a mutation at amino acid Q139, the numbering referring to SEQ ID No. 1. In one embodiment the variant of the fragment of human ACE2 comprises a Q139A mutation, the numbering referring to SEQ ID No. 1.

[0209] In one embodiment, the fragment of human ACE2 consists of the sequence according to SEQ ID No. 2 and comprises a Q139A mutation, the numbering referring to SEQ ID No. 1.

[0210] In one embodiment, the fragment of human ACE2 consists of the sequence according to SEQ ID No. 3 and comprises a Q139A mutation, the numbering referring to SEQ ID No. 1.

[0211] In one embodiment, the fragment of human ACE2 consists of the sequence according to SEQ ID No. 2 and comprises a H374N mutation, a H378N mutation, a L584A mutation and a Q139A mutation, the numbering referring to SEQ ID No. 1.

[0212] In one embodiment, the fragment of human ACE2 consists of the sequence according to SEQ ID No. 3 and comprises a H374N mutation, a H378N mutation, a L584A mutation and a Q139A mutation, the numbering referring to SEQ ID No. 1.

[0213] In one embodiment, the fragment of human ACE2 consists of the sequence according to SEQ ID No. 16 and comprises a Q139A mutation, the numbering referring to SEQ ID No. 1.

[0214] In one embodiment, the fragment of human ACE2 consists of the sequence according to SEQ ID No. 16 and comprises a H374N mutation, a H378N mutation, a L584A mutation and a Q139A mutation, the numbering referring to SEQ ID No. 1.

[0215] In one embodiment, the second part of the fusion protein comprises the Fc portion of human IgG or a variant of the Fc portion of human IgG. The Fc portion of human IgG may be the Fc portion of IgG1, IgG2 or IgG4.

[0216] In one embodiment, the second part of the fusion protein comprises the Fc portion of human IgG4 or a variant thereof. The Fc portion of human IgG4 comprises the CH2 and CH3 domains of human IgG4 linked together to form the Fc portion. In a full-length human IgG4 antibody the Fc portion is connected to the Fab fragment through a hinge region. The Fab fragment comprises the heavy chain variable region and the CH1 domain. Preferably, the Fc portion of human IgG4 used in the fusion protein has the sequence according to SEQ ID No. 5.

[0217] Since the IgG4 subclass of antibodies has only a partial affinity for Fc gamma receptor and does not activate complement (see Muhammed (2020) Immunome Res. 16(1): 173), it does not activate the immune system to the same extent as the IgG1 subclass of antibodies. Consequently, the cytokine expression is stimulated to a lower extent and the risk for a cytokine storm is reduced.

[0218] “A variant of the Fc portion of human IgG4” refers to the Fc portion of human IgG4 which has one or more amino acid substitutions compared to the wild-type Fc portion of human IgG4 according to SEQ ID No. 5. In one embodiment, the variant of the Fc portion of human IgG4 has one to twelve, one to eleven, one to ten, one to nine, one to eight, one to seven, one to six, one to five, one to four, one to three, one or two amino acid substitutions compared to the wild-type Fc portion of human IgG4 according to SEQ ID No. 5. In one embodiment, the variant of the Fc portion of human IgG4 has one, two, three, four, five, six, seven, eight, nine, ten, eleven or twelve amino acid substitutions compared to the wild-type Fc portion of human IgG4 according to SEQ ID No. 5. In one embodiment, the one or more amino acid substitutions lead to decreased effector functions compared to the wild-type Fc portion of human IgG4 according to SEQ ID No. 5. In one embodiment, the one or more amino acid substitutions lead to an increased half-life compared to the wild-type Fc portion of human IgG4 according to SEQ ID No. 5. In one embodiment, the one or more amino acid substitutions lead to decreased effector functions compared to the wild-type Fc portion of human IgG4 according to SEQ ID No. 5 and to an increased half-life compared to the wild-type Fc portion of human IgG4 according to SEQ ID No. 5.

[0219] In one embodiment, the one or more amino acid substitutions do not produce the wild-type Fc portion of IgG1 according to SEQ ID NO: 4. In one embodiment, the one or more amino acid substitutions do not impart upon the altered IgG4 Fc portion the effector functions of wild-type IgG1.

[0220] Preferably, the decreased effector functions comprise a decreased complement-dependent cytotoxicity (CDC). More preferably, the CDC of the variant of the Fc portion of human IgG4 is decreased by at least two-fold, at least three-fold, at least four-fold or at least five-fold compared to the CDC of the wild-type Fc portion of human IgG4 according to SEQ ID No. 5. Methods to determine and quantify CDC are well-known to the skilled person. In general, CDC can be determined by incubating the Fc portion fused to an antigen-binding portion with suitable target cells and complement and detecting the cell death of the target cells. Complement recruitment can be analyzed with a C1q binding assay using ELISA plates (see, e.g., Schlothauer et al. (2016) Protein Eng. Des. Sel. 29(10): 457-466).

[0221] In one embodiment, the variant of the Fc portion of human IgG4 comprises at least one amino acid substitution at an amino acid residue selected from F3, L4, G6, P7, F12, V33, N66 and P98 of the sequence according to SEQ ID No. 5. These amino acid residues correspond to amino acid residues F234, L235, G237, P238, F243, V264, N297 and P329 of full-length human IgG4. It was shown that amino acid substitutions at these residues lead to a reduced effector function (WO 94/28027; WO 94/29351; WO 95/26403; WO 2011/066501; WO 2011/149999; WO 2012/130831; Wang et al. (2018) Protein Cell. 9(1): 63-73).

[0222] In one embodiment, the variant of the Fc portion of human IgG4 comprises the amino acid substitution L4E/A in the sequence according to SEQ ID No. 5 which corresponds to the amino acid substitution L235E/A in the amino acid sequence of full-length human IgG4. This variant has a reduced effector function, in particular reduced CDC.

[0223] In one embodiment, the variant of the Fc portion of human IgG4 comprises the amino acid substitutions F3A and L4A in the sequence according to SEQ ID No. 5 which correspond to the amino acid substitutions F234A and L235A in the amino acid sequence of full-length human IgG4. This variant has a reduced effector function, in particular reduced CDC.

[0224] In one embodiment, the variant of the Fc portion of human IgG4 comprises the amino acid substitutions F3A, L4E, G6A and P7S in the sequence according to SEQ ID No. 5 which correspond to the amino acid substitutions F234A, L235E, G237A and P238S in the amino acid sequence of full-length human IgG4. This variant has a reduced effector function, in particular reduced CDC.

[0225] In one embodiment, the variant of the Fc portion of human IgG4 comprises the amino acid substitutions F12A and V33A in the sequence according to SEQ ID No. 5 which correspond to the amino acid substitutions F243A and V264A in the amino acid sequence of full-length human IgG4. This variant has a reduced effector function, in particular reduced CDC.

[0226] In one embodiment, the variant of the Fc portion of human IgG4 comprises the amino acid substitutions L4E and P98G in the sequence according to SEQ ID No. 5 which correspond to the amino acid substitutions L235E and P329G in the amino acid sequence of full-length human IgG4. This variant has a reduced effector function, in particular reduced CDC.

[0227] In one embodiment, the variant of the Fc portion of human IgG4 comprises the amino acid substitution N66A/Q/G in the sequence according to SEQ ID No. 5 which corresponds to the amino acid substitution N297A/Q/G in the amino acid sequence of full-length human IgG4. This variant has a reduced effector function, in particular reduced CDC.

[0228] In one embodiment, the variant of the Fc portion of human IgG4 comprises at least one amino acid substitution at an amino acid residue selected from T250, M252, S254, T256, E258, K288, T307, V308, Q311, V427, M428, H433, N434 and H435 of full-length human IgG4. These amino acid residues correspond to amino acid residues T19, M21, S23, T25, E27, K57, T76, V77, Q80, V196, M197, H202, N203 and H204 of the sequence according to SEQ ID No. 5. It was shown that these amino acid substitutions lead to an increased half-life of the Fc-containing protein (WO 00/42072; WO 02/060919; WO 2004/035752; WO 2006/053301; WO 2009/058492; WO 2009/086320; US 2010/0204454; GB 2013/02878; WO 2013/163630; US 2019/0010243). The half-life of an antibody or Fc fusion protein can be determined by measuring the antibody or Fc fusion protein concentration in the serum at different time-points after administration of the antibody or Fc fusion protein and calculating the half-life therefrom.

[0229] In one embodiment, the variant of the Fc portion of human IgG4 comprises the amino acid substitutions M21Y, S23T and T25E in the sequence according to SEQ ID No. 5 which corresponds to the amino acid substitutions M252Y, S254T and T256E in the amino acid sequence of full-length human IgG4. In one embodiment, the variant of the Fc portion of human IgG4 has the amino acid sequence according to SEQ ID NO: 20. This variant has an increased half-life.

[0230] In one embodiment, the variant of the Fc portion of human IgG4 comprises the amino acid substitutions T25D and T76Q in the sequence according to SEQ ID NO: 5 which corresponds to the amino acid substitutions T256D and T307Q in the amino acid sequence of full-length human IgG4. In one embodiment, the variant of the Fc portion of human IgG4 has the amino acid sequence according to SEQ ID NO: 21. This variant has an increased half-life and an enhanced binding to FcRn.

[0231] In one embodiment, the variant of the Fc portion of human IgG4 comprises the amino acid substitutions T19Q/E and M197L/F in the sequence according to SEQ ID No. 5 which corresponds to the amino acid substitutions T250Q/E and M428L/F in the amino acid sequence of full-length human IgG4. This variant has an increased half-life.

[0232] In one embodiment, the variant of the Fc portion of human IgG4 comprises the amino acid substitutions N203S and V77W/Y/F in the sequence according to SEQ ID No. 5 which corresponds to the amino acid substitutions N434S and V308W/Y/F in the amino acid sequence of full-length human IgG4. This variant has an increased half-life.

[0233] In one embodiment, the variant of the Fc portion of human IgG4 comprises the amino acid substitutions M21Y and M197L in the sequence according to SEQ ID No. 5 which corresponds to the amino acid substitutions M252Y and M428L in the amino acid sequence of full-length human IgG4. This variant has an increased half-life.

[0234] In one embodiment, the variant of the Fc portion of human IgG4 comprises the amino acid substitutions T76Q and N203S in the sequence according to SEQ ID No. 5 which corresponds to the amino acid substitutions T307Q and N434S in the amino acid sequence of full-length human IgG4. This variant has an increased half-life.

[0235] In one embodiment, the variant of the Fc portion of human IgG4 comprises the amino acid substitutions M197L and V77F in the sequence according to SEQ ID No. 5 which corresponds to the amino acid substitutions M428L and V308F in the amino acid sequence of full-length human IgG4. This variant has an increased half-life.

[0236] In one embodiment, the variant of the Fc portion of human IgG4 comprises the amino acid substitutions Q80V and N203S in the sequence according to SEQ ID No. 5 which corresponds to the amino acid substitutions Q311V and N434S in the amino acid sequence of full-length human IgG4. This variant has an increased half-life.

[0237] In one embodiment, the variant of the Fc portion of human IgG4 comprises the amino acid substitutions H202K and N203F in the sequence according to SEQ ID No. 5 which corresponds to the amino acid substitutions H433K and N434F in the amino acid sequence of full-length human IgG4. This variant has an increased half-life.

[0238] In one embodiment, the variant of the Fc portion of human IgG4 comprises the amino acid substitutions E27F and V196T in the sequence according to SEQ ID No. 5 which corresponds to the amino acid substitutions E258F and V427T in the amino acid sequence of full-length human IgG4. This variant has an increased half-life.

[0239] In one embodiment, the variant of the Fc portion of human IgG4 comprises the amino acid substitutions K57E and H204K in the sequence according to SEQ ID No. 5 which corresponds to the amino acid substitutions K288E and H435K in the amino acid sequence of full-length human IgG4. This variant has an increased half-life.

[0240] In one embodiment, the second part of the fusion protein comprises the Fc portion of human IgG1 or a variant thereof. The Fc portion of human IgG1 comprises the CH2 and CH3 domains of human IgG1 linked together to form the Fc portion. In a full-length human IgG1 antibody the Fc portion is connected to the Fab fragment through a hinge region. The Fab fragment comprises the heavy chain variable region and the CH1 domain. Preferably, the Fc portion of human IgG1 used in the fusion protein has the sequence according to SEQ ID No. 4.

[0241] “A variant of the Fc portion of human IgG1” refers to the Fc portion of human IgG4 which has one or more amino acid substitutions compared to the wild-type Fc portion of human IgG1 according to SEQ ID No. 4. In one embodiment, the one or more amino acid substitutions lead to decreased effector functions compared to the wild-type Fc portion of human IgG1 according to SEQ ID No. 4.

[0242] Preferably, the decreased effector functions comprise a decreased complement-dependent cytotoxicity (CDC). More preferably, the CDC is decreased by at least two-fold, at least three-fold, at least four-fold or at least five-fold compared to the CDC of the wild-type Fc portion of human IgG1 according to SEQ ID No. 4. Methods to determine and quantify CDC are well-known to the skilled person and have been described above.

[0243] In one embodiment, the variant of the Fc portion of human IgG1 comprises at least one amino acid substitution at an amino acid residue selected from L3, L4 and P98 of the sequence according to SEQ ID No. 4. These amino acid residues correspond to amino acid residues L234, L235, and P329 of full-length human IgG1.

[0244] In one embodiment, the variant of the Fc portion of human IgG1 comprises the amino acid substitution L4E/A in the sequence according to SEQ ID No. 4 which corresponds to the amino acid substitution L235E/A in the amino acid sequence of full-length human IgG1. This variant has a reduced effector function, in particular reduced CDC.

[0245] In one embodiment, the variant of the Fc portion of human IgG1 comprises the amino acid substitutions L3A and L4A in the sequence according to SEQ ID No. 4 which correspond to the amino acid substitutions L234A and L235A in the amino acid sequence of full-length human IgG1. This variant has a reduced effector function, in particular reduced CDC.

[0246] In one embodiment, the variant of the Fc portion of human IgG1 comprises the amino acid substitutions L3A, L4A, P98G in the sequence according to SEQ ID No. 4 which correspond to the amino acid substitutions L234A, L235A and P329G in the amino acid sequence of full-length human IgG1. This variant has a reduced effector function, in particular reduced CDC.

[0247] In one embodiment, the variant of the Fc portion of human IgG1 comprises the amino acid substitutions L4A and P98G in the sequence according to SEQ ID No. 4 which correspond to the amino acid substitutions L235A and P329G in the amino acid sequence of full-length human IgG1. This variant has a reduced effector function, in particular reduced CDC.

[0248] In one embodiment, the variant of the Fc portion of human IgG1 comprises the amino acid substitutions M21Y, S23T and T25E in the sequence according to SEQ ID NO: 4 which corresponds to the amino acid substitutions M252Y, S254T and T256E in the amino acid sequence of full-length human IgG1. In one embodiment, the variant of the Fc portion of human IgG1 has the amino acid sequence according to SEQ ID NO: 22. This variant has an increased half-life and an enhanced binding to FcRn.

[0249] In one embodiment, the variant of the Fc portion of human IgG1 comprises the amino acid substitutions T25D and T76Q in the sequence according to SEQ ID NO: 4 which corresponds to the amino acid substitutions T256D and T307Q in the amino acid sequence of full-length human IgG1. In one embodiment, the variant of the Fc portion of human IgG1 has the amino acid sequence according to SEQ ID NO: 23. This variant has an increased half-life and an enhanced binding to FcRn.

[0250] In one embodiment, the Fc portion of a human antibody or fragment or variant thereof is afucosylated. The term “afucosylated” means that a protein, here the Fc portion of a human antibody, comprises a glycan structure lacking a fucose moiety. A fucose moiety may be attached to the N-acetylglucosamine moiety within the glycan structure. Afucosylated proteins such as the Fc portion of a human antibody lack this fucose moiety attached to the N-acetylglucosamine moiety. An afucosylated antibody or Fc part of a human antibody has an amount of fucose of 60% or less, 50% or less, 40% or less or 30% or less or 20% or less of the total amount of oligosaccharides at asparagine 297 (which is asparagine 66 in the sequence according to SEQ ID NO: 4 or 5). In one embodiment, the afucosylated antibody or Fc part of a human antibody has an amount of fucose of 40% to 60% of the total amount of oligosaccharides at asparagine 297 (which is asparagine 66 in the sequence according to SEQ ID NO: 4 or 5). In one embodiment, the afucosylated antibody or Fc part of a human antibody does not have any fucose attached to the glycan structure at asparagine 297 (which is asparagine 66 in the sequence according to SEQ ID NO: 4 or 5). In certain embodiments, the liquid pharmaceutical composition of the present invention contain at least 20%, 30%, 40%, 50%, 60%, 70%, 80%, 90%, 91%, 92%, 93%, 94%, 95%, 96%, 97%, 98%, 99%, or 100% afucosylated molecules. It is not required that all the N-glycosylated fusion proteins are afucosylated.

[0251] The afucosylation can be analyzed by different methods known to the skilled person, including digestion of the fusion protein and analysis by peptide mapping. Alternatively, hydrophilic interaction liquid chromatography (HILIC) may be performed for glycoprotein analysis.

[0252] It was shown that afucosylated antibodies or Fc parts thereof show an increased antibody-dependent cell-mediated cytotoxicity (ADCC) due to a stronger affinity for the FcγRlIl (Shields et al. (2002) J. Biol. Chem. 277: 26733-26740), Kanda et al. (2007) J. Biotechnol. 130: 300-310; Yamane-Ohunuki et al. (2004) Biotechnol. Bioeng. 87: 614-622).

[0253] Afucosylated fusion proteins can be produced by culturing host cells expressing the fusion protein under specific conditions in a medium supplemented with a fucosylation inhibitor. A “fucosylation inhibitor” is a molecule which binds to an enzyme involved in protein fucosylation, in particular to a fucosyltransferase, and inhibits its activity. Suitable fucosylation inhibitors include, but are not limited to, 2-fluorofucose, A2FF1P, B2FF1P (Pijnenborg et al. (2020) Chem. Eur. J. 27: 4022-4027), 2F-peracetyl-fucose, peracetylated 5-thiofucose, 2-deoxy-D-galactose, peracetylated 6-alkyyl-fucose and 6,6,6-trifluorofucose (Li et al. (2018) Cell Chemical Biology 25: 499-512), GDP-D-rhamnose, Ac-GDP-D-rhamnose, sodium rhamnose phosphate (WO 2021/127414), 5-alkynyl-fucose and 5-alkynyl-fucose peracetate (Zimermann et al. (2019) Antibodies 8(1): 9).

[0254] Preferably, the fucosylation inhibitor is 2-fluorofucose. Preferably, the 2-fluorofucose is added to the cell culture medium at a concentration of 5 to 200 μM, preferably at a concentration of 10 to 150 μM.

[0255] Alternatively, afucosylated proteins can be produced by culturing host cells expressing the fusion protein, wherein the eukaryotic host cell is genetically modified to decrease the activity of a protein involved in fucosylation.

[0256] In one embodiment, the protein involved in fucosylation is selected from the group consisting of GDP-mannose 4,6-dehydratase (GMD) (Kanda et al. (2007) J. Biotechnol. 130: 300-310), GDP-fucose transporter (GFT) (Bardhi et al. (2017) J. Virol. 91(20): e937-917; Chen et al. (2016) MABs 8: 761-774) and alpha-(1,6)-fucosyltransferase (FUT8) (Mori et al. (2004) Biotechnol. Bioeng. 88: 901-908; Imai-Nishiya et al. (2007) BMC Biotechnol. 7:84; Dicker and Strasser (2015) Expert Opin. Bio. Ther. 15: 1501-1516).

[0257] In one embodiment, the first and the second part of the fusion protein are linked by a linking sequence. The linking sequence is a short amino acid sequence which does not have a function on its own and which does not affect the folding of the fusion protein. In one embodiment, the linking sequence comprises eight to twenty amino acids, preferably 10 to 18 amino acids, more preferably 11 to 17 amino acids or 12 to 16 amino acids and most preferably 13 amino acids. In one embodiment, if the second part of the fusion protein is the Fc portion of human IgG4 or a variant thereof, the linking sequence comprises eight to twenty amino acids, preferably 10 to 18 amino acids, more preferably 11 to 17 amino acids or 12 to 16 amino acids and most preferably 13 amino acids. In one embodiment, if the second part of the fusion protein is the Fc portion of human IgG1 or a variant thereof, the linking sequence comprises seven to 18 amino acids, preferably 8 to 15 amino acids, more preferably 9 to 14 amino acids or 10 to 13 amino acids and most preferably 11 amino acids.

[0258] In one embodiment, the linking sequence consists of small amino acids selected from glycine and serine. An overview of linking sequences is provided in Chen et al. (2013) Adv. Drug Deliv. Rev. 65(10): 1357-1369.

[0259] In one embodiment, if the second part of the fusion protein is the Fc portion of human IgG4, the linking sequence consists of the hinge region of human IgG4. In one embodiment, the linking sequence consists of the sequence according to SEQ ID No. 18. In the sequence according to SEQ ID No. 18 the serine at residue 10 of the wild-type hinge region of IgG4 (corresponding to serine 228 of full-length IgG4) has been replaced with proline, leading to a reduction in the exchange of IgG half-molecules. It is known that IgG4 antibodies can undergo Fab-arm exchange, leading to the combination of two distinct Fab arms and creating new bispecific antibody molecules (see, e.g., Aalberse et al. (2009) Clin. Exp. Allergy 39(4): 469-477). This Fab-arm exchange can be prevented by a mutation of serine 228 of the Fc region to proline (S228P; see Silva et al. (2015) J. Biol. Chem. 290: 5462-5469) which is located in the hinge region of IgG4. Further, the use of a short linker sequence increases the stability of the fusion protein and lowers the accessibility of the fusion protein to proteases.

[0260] In one embodiment, if the second part of the fusion protein is the Fc portion of human IgG1, the linking sequence consists of the hinge region of human IgG1. In one embodiment, the linking sequence consists of the sequence according to SEQ ID No. 19.

[0261] In a particular embodiment, the fusion protein has the amino acid sequence according to SEQ ID No. 6 which comprises amino acids 18 to 732 of human ACE2 (SEQ ID No. 2), the linking sequence according to SEQ ID No. 18 and the Fc portion of human IgG4 according to SEQ ID No. 5.

[0262] In another particular embodiment, the fusion protein has the amino acid sequence according to SEQ ID No. 7 which comprises amino acids 18 to 732 of human ACE2 (SEQ ID No. 2), the linking sequence according to SEQ ID No. 19 and the Fc portion of human IgG1 according to SEQ ID No. 4.

[0263] In another particular embodiment, the fusion protein has the amino acid sequence according to SEQ ID No. 8 which comprises amino acids 18 to 740 of human ACE2 (SEQ ID No. 3) the linking sequence according to SEQ ID No. 18 and the Fc portion of human IgG4 according to SEQ ID No. 5.

[0264] In another particular embodiment, the fusion protein has the amino acid sequence according to SEQ ID No. 9 which comprises amino acids 18 to 740 of human ACE2 (SEQ ID No. 3), the linking sequence according to SEQ ID No. 19 and the Fc portion of human IgG1 according to SEQ ID No. 4.

[0265] In a particular embodiment, the fusion protein has the amino acid sequence according to SEQ ID No. 10 which comprises amino acids 18 to 732 of human ACE2 (SEQ ID No. 2) with a H374N and H378N mutation, the numbering referring to SEQ ID NO: 1, the linking sequence according to SEQ ID No. 18 and the Fc portion of human IgG4 according to SEQ ID No. 5.

[0266] In a particular embodiment, the fusion protein of the present invention has the amino acid sequence according to SEQ ID NO: 11 which comprises amino acids 18 to 732 of human ACE2 (SEQ ID NO: 2) with a H374N and H378N mutation, the numbering referring to SEQ ID NO: 1, the linking sequence according to SEQ ID NO: 19 and the Fc portion of human IgG1 according to SEQ ID NO: 4.

[0267] In another particular embodiment, the fusion protein has the amino acid sequence according to SEQ ID No. 12 which comprises amino acids 18 to 740 of human ACE2 (SEQ ID No. 3) with a H374N and a H378N mutation, the numbering referring to SEQ ID No. 1, the linking sequence according to SEQ ID No. 18 and the Fc portion of human IgG4 according to SEQ ID No. 5.

[0268] In a particular embodiment, the fusion protein of the present invention has the amino acid sequence according to SEQ ID NO: 13 which comprises amino acids 18 to 740 of human ACE2 (SEQ ID NO: 3) with a H374N and H378N mutation, the numbering referring to SEQ ID NO: 1, the linking sequence according to SEQ ID NO: 19 and the Fc portion of human IgG1 according to SEQ ID NO:4.

[0269] In a particular embodiment, the fusion protein of the present invention has the amino acid sequence according to SEQ ID NO: 26 which comprises amino acids 18 to 732 of human ACE2 (SEQ ID NO: 2), the linking sequence according to SEQ ID NO: 18 and the variant of the Fc portion of human IgG4 according to SEQ ID NO:20.

[0270] In a particular embodiment, the fusion protein of the present invention has the amino acid sequence according to SEQ ID NO: 27 which comprises amino acids 18 to 732 of human ACE2 (SEQ ID NO: 2), the linking sequence according to SEQ ID NO: 19 and the variant of the Fc portion of human IgG1 according to SEQ ID NO:22.

[0271] In a particular embodiment, the fusion protein of the present invention has the amino acid sequence according to SEQ ID NO: 30 which comprises amino acids 18 to 740 of human ACE2 (SEQ ID NO: 3), the linking sequence according to SEQ ID NO: 18 and the variant of the Fc portion of human IgG4 according to SEQ ID NO:20.

[0272] In a particular embodiment, the fusion protein of the present invention has the amino acid sequence according to SEQ ID NO: 31 which comprises amino acids 18 to 740 of human ACE2 (SEQ ID NO: 3), the linking sequence according to SEQ ID NO: 19 and the variant of the Fc portion of human IgG1 according to SEQ ID NO:22.

[0273] In a particular embodiment, the fusion protein of the present invention has the amino acid sequence according to SEQ ID NO: 34 which comprises amino acids 18 to 732 of human ACE2 (SEQ ID NO: 2) with a H374N and H378N mutation, the numbering referring to SEQ ID NO: 1, the linking sequence according to SEQ ID NO: 18 and the variant of the Fc portion of human IgG4 according to SEQ ID NO:20.

[0274] In a particular embodiment, the fusion protein of the present invention has the amino acid sequence according to SEQ ID NO: 35 which comprises amino acids 18 to 732 of human ACE2 (SEQ ID NO: 2) with a H374N and H378N mutation, the numbering referring to SEQ ID NO: 1, the linking sequence according to SEQ ID NO: 19 and the variant of the Fc portion of human IgG1 according to SEQ ID NO:22.

[0275] In a particular embodiment, the fusion protein of the present invention has the amino acid sequence according to SEQ ID NO: 38 which comprises amino acids 18 to 740 of human ACE2 (SEQ ID NO: 3) with a H374N and H378N mutation, the numbering referring to SEQ ID NO: 1, the linking sequence according to SEQ ID NO: 18 and the variant of the Fc portion of human IgG4 according to SEQ ID NO:20.

[0276] In a particular embodiment, the fusion protein of the present invention has the amino acid sequence according to SEQ ID NO: 39 which comprises amino acids 18 to 740 of human ACE2 (SEQ ID NO: 3) with a H374N and H378N mutation, the numbering referring to SEQ ID NO: 1, the linking sequence according to SEQ ID NO: 19 and the variant of the Fc portion of human IgG1 according to SEQ ID NO:22.

[0277] In one embodiment, any of the above fusion proteins described herein is fused to IP10 or a variant thereof. IP10 (with synonyms CXCL10, gamma-IP10, small-inducible cytokine B10, INP10, SCYB10 and 10 kDA interferon gamma-inducible protein) is a chemokine binding to immune cells via the chemokine receptor CXCR3, leading to the chemoattraction of different immune cells, promotion of T cell adhesion to endothelial cells, antitumor activity and inhibition of bone marrow colony formation and angiogenesis. Moreover, IP10 plays an important role during viral infections by stimulating the activation and migration of immune cells to the infected sites. The amino acid sequence of IP10 is depicted in SEQ ID NO: 98. It was shown that IP10 is able to form tetramers (Swaminathan et al. (2003) Structure 11: 521-532). Hence, in the fusion protein comprising IP10 the IP10 part will provide tetramers of fusion protein molecules, thereby increasing the affinity of the fusion proteins to their target such as the spike protein of SARS-CoV-2. Due to the higher affinity of the tetrameric fusion protein for the target, it may be possible to decrease the dosage of the fusion protein. Additionally, it was shown that a fusion protein of IP10 with scFv is able to recruit immune effector cells (Guo et al. (2004) Biochem. Biophys. Res. Comm. 320: 506-513). Hence, the fusion protein comprising IP10 can recruit immune effector cells to the target bound by the ACE2-Fc fusion protein, in particular the spike protein of SARS-CoV-2, and lead to the neutralization of the virus.

[0278] Preferably, the IP10 is fused to the C-terminus of the Fc part of a human antibody.

[0279] In one embodiment, the Fc part of a human antibody and the IP10 are linked by a linking sequence. In one embodiment, the linking sequence between the Fc part of a human antibody consists of small amino acids selected from glycine and serine. In one embodiment, the linking sequence between the Fc part of a human antibody consists of 8 to 14, preferably 9 to 13, more preferably 10 to 12 and most preferably 11 amino acids. In one embodiment, the linking sequence between the Fc part of a human antibody consists of 8 to 14, preferably 9 to 13, more preferably 10 to 12 and most preferably 11 amino acids selected from glycine and serine. In one embodiment, the linking sequence consists of the amino acid sequence according to SEQ ID NO: 14.

[0280] “A variant of IP10” refers to IP10 which has one or more amino acid substitutions compared to the wild-type IP10 according to SEQ ID NO: 98. The variant of IP10 is still able to form tetramers and to recruit immune effector cells.

[0281] In a preferred embodiment, the fusion protein has an amino acid sequence selected from the group consisting of SEQ ID NO: 99, SEQ ID NO: 100, SEQ ID NO: 101, SEQ ID NO: 102, SEQ ID NO: 103, SEQ ID NO: 104, SEQ ID NO: 105, SEQ ID NO: 106, SEQ ID NO: 107, SEQ ID NO: 108, SEQ ID NO: 109, SEQ ID NO: 110, SEQ ID NO: 111, SEQ ID NO: 112, SEQ ID NO: 113, SEQ ID NO: 114, SEQ ID NO: 115, SEQ ID NO: 116, SEQ ID NO: 117, SEQ ID NO: 118, SEQ ID NO: 119, SEQ ID NO: 120, SEQ ID NO: 121, SEQ ID NO: 122, SEQ ID NO: 123, SEQ ID NO: 124, SEQ ID NO: 125, SEQ ID NO: 126, SEQ ID NO: 127, SEQ ID NO: 128, SEQ ID NO: 129, SEQ ID NO: 130, SEQ ID NO: 131, SEQ ID NO: 132, SEQ ID NO: 133, SEQ ID NO: 134, SEQ ID NO: 135, SEQ ID NO: 136, SEQ ID NO: 137, SEQ ID NO: 138, SEQ ID NO: 139, SEQ ID NO: 140, SEQ ID NO: 141, SEQ ID NO: 142, SEQ ID NO: 143, SEQ ID NO: 144, SEQ ID NO: 145, SEQ ID NO: 146, SEQ ID NO: 147, SEQ ID NO: 148, SEQ ID NO: 149, SEQ ID NO: 150, SEQ ID NO: 151, SEQ ID NO: 152, SEQ ID NO: 153, SEQ ID NO: 154, SEQ ID NO: 155, SEQ ID NO: 156, SEQ ID NO: 157, SEQ ID NO: 158, SEQ ID NO: 159, SEQ ID NO: 160, SEQ ID NO: 161, SEQ ID NO: 162, SEQ ID NO: 163, SEQ ID NO: 164, SEQ ID NO: 165, SEQ ID NO: 166, SEQ ID NO: 167, SEQ ID NO: 168, SEQ ID NO: 169 and SEQ ID NO: 170.

[0282] In one embodiment, the liquid pharmaceutical composition of the invention comprises:
[0283] (a) a fusion protein comprising a first part comprising a fragment of human ACE2 or a variant of said fragment, said human ACE2 having the amino acid sequence according to SEQ ID No. 1, and a second part comprising the Fc portion of a human IgG linked to IP10; and (b) a buffer having a pH of 5.6 to 6.4. In one embodiment, the pH of the liquid pharmaceutical composition is from 5.6 to 6.0 and the buffer is selected from acetate buffer, histidine buffer, phosphate buffer, citrate buffer, and succinate buffer preferably, acetate buffer. Preferably, the buffer is present at a concentration of 5 mM to 60 mM. In one embodiment, the liquid pharmaceutical composition further comprises a sugar and/or sugar alcohol selected from trehalose, sucrose and mannitol preferably, trehalose. Preferably, the sugar and/or sugar alcohol is at a concentration of 100 mM to 300 mM. In one embodiment, the liquid pharmaceutical composition further comprises a non-ionic surfactant, preferably the non-ionic surfactant is selected from polysorbate 20 and polysorbate 80, Preferably, the non-ionic surfactant is present at a concentration of 0.01% (w/v) to 0.2% (w/v). In one embodiment, the liquid pharmaceutical composition further comprises an inorganic salt, preferably the inorganic salt is sodium chloride. Preferably, the inorganic salt is present at a concentration of 30 mM to 150 mM. In one embodiment, the liquid pharmaceutical composition further comprises one or more amino acids selected from L-arginine, and L-methionine, preferably at a concentration of 1 mM to 50 mM. In a preferred embodiment, the IP10 comprises an amino acid sequence according to SEQ ID No. 98 or a variant thereof. In preferred embodiments, the fusion protein comprises an amino acid sequence according to any one of SEQ ID No. 99-102, 111-114, 123-126, 135-138, 147-150, 159-162. In a preferred embodiment, the IP10 comprises an amino acid sequence according to SEQ ID No. 98 or a variant thereof and the fusion protein comprises an amino acid sequence according to any one of SEQ ID No. 99-102, 111-114, 123-126, 135-138, 147-150, 159-162.

[0284] In one embodiment, the liquid pharmaceutical composition of the invention comprises:
[0285] (a) a fusion protein comprising a first part comprising a fragment of human ACE2 or a variant of said fragment, said human ACE2 having the amino acid sequence according to SEQ ID No. 1, and a second part comprising the Fc portion of a human IgG linked to IP10;
[0286] (b) an acetate buffer having a pH of 5.6 to 6.0,
[0287] (c) polysorbate 20 or polysorbate 80;
[0288] (d) trehalose or sucrose; and
[0289] (e) optionally, one or more stabilizers selected from the group consisting of L-arginine, L-methionine, and inorganic salts preferably, sodium chloride. In a preferred embodiment, the IP10 comprises an amino acid sequence according to SEQ ID No. 98 or a variant thereof and the fusion protein comprises an amino acid sequence according to any one of SEQ ID No. 99-102, 111-114, 123-126, 135-138, 147-150, 159-162.

[0290] In one embodiment, the liquid pharmaceutical composition of the invention comprises:
[0291] (a) a fusion protein comprising a first part comprising a fragment of human ACE2 or a variant of said fragment, said human ACE2 having the amino acid sequence according to SEQ ID No. 1, and a second part comprising the Fc portion of a human IgG linked to IP10; and (b) a buffer having a pH of 5.6 to 6.4. In one embodiment, the pH of the liquid pharmaceutical composition is from 6.1 to 6.4, preferably 6.2. In a preferred embodiment, the buffer is L-Arginine HCl, preferably at a concentration of 10 mM to 40 mM. In one embodiment, the liquid pharmaceutical composition further comprises a sugar and/or sugar alcohol selected from trehalose, sucrose and mannitol preferably, trehalose. Preferably, the sugar and/or sugar alcohol is present at a concentration of 20 mM to 250 mM. In one embodiment, the liquid pharmaceutical composition further comprises a non-ionic surfactant, preferably the non-ionic surfactant is selected from polysorbate 20 and polysorbate 80, Preferably, the non-ionic surfactant is polysorbate 20. Preferably, the non-ionic surfactant is present at a concentration of 0.01% (w/v) to 0.2% (w/v). In one embodiment, the liquid pharmaceutical composition further comprises L-methionine, preferably at a concentration of 1 mM to 50 mM, more preferably at 1 mM to 20 mM, even more preferably 1 mM to 10 mM such as 5 mM. In one embodiment, the liquid pharmaceutical composition further comprises an inorganic salt, preferably the inorganic salt is sodium chloride. Preferably, the inorganic salt is present at a concentration of 30 mM to 150 mM. In a preferred embodiment, the IP10 comprises an amino acid sequence according to SEQ ID No. 98 or a variant thereof. In a preferred embodiment, the fusion protein comprises an amino acid sequence according to any one of SEQ ID No. 99-102, 111-114, 123-126, 135-138, 147-150, 159-162. In a preferred embodiment, the IP10 comprises an amino acid sequence according to SEQ ID No. 98 or a variant thereof and the fusion protein comprises an amino acid sequence according to any one of SEQ ID No. 99-102, 111-114, 123-126, 135-138, 147-150, 159-162.

[0292] In one embodiment, the liquid pharmaceutical composition of the invention comprises:
[0293] (a) a fusion protein comprising a first part comprising a fragment of human ACE2 or a variant of said fragment, said human ACE2 having the amino acid sequence according to SEQ ID No. 1, and a second part comprising the Fc portion of a human IgG linked to IP10;
[0294] (b) L-Arginine HCL buffer having a pH of 6.1 to 6.4 preferably 6.2,
[0295] (c) polysorbate 20 or polysorbate 80;
[0296] (d) trehalose or sucrose; and
[0297] (e) optionally, one or more stabilizers selected from L-methionine and inorganic salts preferably, sodium chloride. In a preferred embodiment, the IP10 comprises an amino acid sequence according to SEQ ID No. 98 or a variant thereof and the fusion protein comprises an amino acid sequence according to any one of SEQ ID No. 99-102, 111-114, 123-126, 135-138, 147-150, 159-162.

[0298] In one embodiment, the liquid pharmaceutical composition of the invention comprises:
[0299] (a) a fusion protein comprising a first part comprising a fragment of human ACE2 or a variant of said fragment, said human ACE2 having the amino acid sequence according to SEQ ID No. 1, and a second part comprising a variant of the Fc portion of a human IgG linked to IP10; and (b) a buffer having a pH of 5.6 to 6.4. In one embodiment, the pH of the liquid pharmaceutical composition is from 5.6 to 6.0 and the buffer is selected from acetate buffer, histidine buffer, phosphate buffer, citrate buffer, and succinate buffer preferably, acetate buffer. Preferably, the buffer is present at a concentration of 5 mM to 60 mM. In one embodiment, the liquid pharmaceutical composition further comprises a sugar and/or sugar alcohol selected from trehalose, sucrose and mannitol preferably, trehalose. Preferably, the sugar and/or sugar alcohol is at a concentration of 100 mM to 300 mM. In one embodiment, the liquid pharmaceutical composition further comprises a non-ionic surfactant, preferably the non-ionic surfactant is selected from polysorbate 20 and polysorbate 80, Preferably, the non-ionic surfactant is present at a concentration of 0.01% (w/v) to 0.2% (w/v). In one embodiment, the liquid pharmaceutical composition further comprises an inorganic salt, preferably the inorganic salt is sodium chloride. Preferably, the inorganic salt is present at a concentration of 30 mM to 150 mM. In one embodiment, the liquid pharmaceutical composition further comprises one or more amino acids selected from L-arginine, and L-methionine, preferably at a concentration of 1 mM to 50 mM. In a preferred embodiment, the IP10 comprises an amino acid sequence according to SEQ ID No. 98 or a variant thereof. In preferred embodiments, the fusion protein comprises an amino acid sequence according to any one of SEQ ID No. 103-110, 115-122, 127-134, 139-146, 151-158, 163-170. In a preferred embodiment, the IP10 comprises an amino acid sequence according to SEQ ID No. 98 or a variant thereof and the fusion protein comprises an amino acid sequence according to any one of SEQ ID No. 103-110, 115-122, 127-134, 139-146, 151-158, 163-170.

[0300] In one embodiment, the liquid pharmaceutical composition of the invention comprises:
[0301] (a) a fusion protein comprising a first part comprising a fragment of human ACE2 or a variant of said fragment, said human ACE2 having the amino acid sequence according to SEQ ID No. 1, and a second part comprising the Fc portion of a human IgG linked to IP10;
[0302] (b) an acetate buffer having a pH of 5.6 to 6.0,
[0303] (c) polysorbate 20 or polysorbate 80;
[0304] (d) trehalose or sucrose; and
[0305] (e) optionally, one or more stabilizers selected from the group consisting of L-arginine, L-methionine and inorganic salts preferably, sodium chloride. In a preferred embodiment, the IP10 comprises an amino acid sequence according to SEQ ID No. 98 or a variant thereof and the fusion protein comprises an amino acid sequence according to any one of SEQ ID No. 103-110, 115-122, 127-134, 139-146, 151-158, 163-170.

[0306] In one embodiment, the liquid pharmaceutical composition of the invention comprises:
[0307] (a) a fusion protein comprising a first part comprising a fragment of human ACE2 or a variant of said fragment, said human ACE2 having the amino acid sequence according to SEQ ID No. 1, and a second part comprising the Fc portion of a human IgG linked to IP10; and (b) a buffer having a pH of 5.6 to 6.4. In one embodiment, the pH of the liquid pharmaceutical composition is from 6.1 to 6.4, preferably 6.2. In a preferred embodiment, the buffer is L-Arginine HCl, preferably at a concentration of 10 mM to 40 mM. In one embodiment, the liquid pharmaceutical composition further comprises a sugar and/or sugar alcohol selected from trehalose, sucrose, and mannitol preferably, trehalose. Preferably, the sugar and/or sugar alcohol is present at a concentration of 20 mM to 250 mM. In one embodiment, the liquid pharmaceutical composition further comprises a non-ionic surfactant, preferably the non-ionic surfactant is selected from polysorbate 20 and polysorbate 80, Preferably, the non-ionic surfactant is polysorbate 20. Preferably, the non-ionic surfactant is present at a concentration of 0.01% (w/v) to 0.2% (w/v). In one embodiment, the liquid pharmaceutical composition further comprises L-methionine, preferably at a concentration of 1 mM to 50 mM, more preferably at 1 mM to 20 mM, even more preferably 1 mM to 10 mM such as 5 mM. In one embodiment, the liquid pharmaceutical composition further comprises an inorganic salt, preferably the inorganic salt is sodium chloride. Preferably, the inorganic salt is present at a concentration of 30 mM to 150 mM. In a preferred embodiment, the IP10 comprises an amino acid sequence according to SEQ ID No. 98 or a variant thereof. In a preferred embodiment, the fusion protein comprises an amino acid sequence according to any one of SEQ ID No. 103-110, 115-122, 127-134, 139-146, 151-158, 163-170. In a preferred embodiment, the IP10 comprises an amino acid sequence according to SEQ ID No. 98 or a variant thereof and the fusion protein comprises an amino acid sequence according to any one of SEQ ID No. 103-110, 115-122, 127-134, 139-146, 151-158, 163-170.

[0308] In one embodiment, the liquid pharmaceutical composition of the invention comprises:
[0309] (a) a fusion protein comprising a first part comprising a fragment of human ACE2 or a variant of said fragment, said human ACE2 having the amino acid sequence according to SEQ ID No. 1, and a second part comprising the Fc portion of a human IgG linked to IP10;
[0310] (b) L-Arginine HCL buffer having a pH of 6.1 to 6.4 preferably 6.2,
[0311] (c) polysorbate 20 or polysorbate 80;
[0312] (d) trehalose or sucrose; and
[0313] (e) optionally, one or more stabilizers selected from L-methionine and inorganic salts preferably, sodium chloride. In a preferred embodiment, the IP10 comprises an amino acid sequence according to SEQ ID No. 98 or a variant thereof and the fusion protein comprises an amino acid sequence according to any one of SEQ ID No. 103-110, 115-122, 127-134, 139-146, 151-158, 163-170.

[0314] In one embodiment, the buffer is an acetate buffer and the fusion protein has the amino acid sequence according to SEQ ID NO. 6.

[0315] In one embodiment, the buffer is an acetate buffer having a pH within the range of 5.6 to 6.0 and the fusion protein has the amino acid sequence according to SEQ ID NO. 6.

[0316] In one embodiment, the buffer is an acetate buffer with a pH of 5.6 and the fusion protein has the amino acid sequence according to SEQ ID NO. 6.

[0317] In one embodiment, the buffer is an acetate buffer with a pH of 5.8 and the fusion protein has the amino acid sequence according to SEQ ID NO. 6.

[0318] In one embodiment, the buffer is an acetate buffer with a concentration of 10 to 20 mM and the fusion protein has the amino acid sequence according to SEQ ID NO. 6.

[0319] In one embodiment, the buffer is an acetate buffer with a concentration of 10 to 20 mM and a pH within the range of 5.6 to 6.0 and the fusion protein has the amino acid sequence according to SEQ ID NO. 6.

[0320] In one embodiment, the buffer is an acetate buffer with a concentration of 10 to 20 mM and a pH of 5.6 and the fusion protein has the amino acid sequence according to SEQ ID NO. 6.

[0321] In one embodiment, the buffer is an acetate buffer with a concentration of 10 to 20 mM and a pH of 5.8 and the fusion protein has the amino acid sequence according to SEQ ID NO. 6.

[0322] In one embodiment, the buffer is an acetate buffer with a concentration of 20 mM and a pH of 5.6, the fusion protein has the amino acid sequence according to SEQ ID NO. 6 and the sugar is trehalose with a concentration of 106 mM.

[0323] In one embodiment, the buffer is an acetate buffer with a concentration of 20 mM and a pH of 5.6, the fusion protein has the amino acid sequence according to SEQ ID NO. 6 and the sugar is trehalose with a concentration of 250 mM.

[0324] In one embodiment, the buffer is an acetate buffer with a concentration of 10 mM and a pH of 5.8, the fusion protein has the amino acid sequence according to SEQ ID NO. 6 and the sugar is trehalose with a concentration of 106 mM.

[0325] In one embodiment, the buffer is an acetate buffer with a concentration of 10 mM and a pH of 5.8, the fusion protein has the amino acid sequence according to SEQ ID NO. 6 and the sugar is trehalose with a concentration of 250 mM.

[0326] In one embodiment, the buffer is an acetate buffer with a concentration of 20 mM and a pH of 5.6, the fusion protein has the amino acid sequence according to SEQ ID NO. 6 and the sugar is sucrose with a concentration of 263 mM.

[0327] In one embodiment, the buffer is an acetate buffer with a concentration of 10 mM and a pH of 5.8, the fusion protein has the amino acid sequence according to SEQ ID NO. 6 and the sugar is sucrose with a concentration of 263 mM.

[0328] In one embodiment, the buffer is an acetate buffer with a concentration of 20 mM and a pH of 5.6, the fusion protein has the amino acid sequence according to SEQ ID NO. 6 and the surfactant is polysorbate 20 with a concentration of 0.02% (w/v).

[0329] In one embodiment, the buffer is an acetate buffer with a concentration of 20 mM and a pH of 5.8, the fusion protein has the amino acid sequence according to SEQ ID NO. 6 and the surfactant is polysorbate 20 with a concentration of 0.02% (w/v).

[0330] In one embodiment, the buffer is an acetate buffer with a concentration of 10 mM and a pH of 5.6, the fusion protein has the amino acid sequence according to SEQ ID NO. 6 and the surfactant is polysorbate 20 with a concentration of 0.02% (w/v).

[0331] In one embodiment, the buffer is an acetate buffer with a concentration of 10 mM and a pH of 5.8, the fusion protein has the amino acid sequence according to SEQ ID NO. 6, the sugar is trehalose with a concentration of 106 mM and the surfactant is polysorbate 20 with a concentration of 0.02% (w/v).

[0332] In one embodiment, the buffer is an acetate buffer with a concentration of 20 mM and a pH of 5.6, the fusion protein has the amino acid sequence according to SEQ ID NO. 6, the sugar is trehalose with a concentration of 106 mM and the surfactant is polysorbate 20 with a concentration of 0.02% (w/v).

[0333] In one embodiment, the buffer is an acetate buffer with a concentration of 20 mM and a pH of 5.8, the fusion protein has the amino acid sequence according to SEQ ID NO. 6, the sugar is trehalose with a concentration of 106 mM and the surfactant is polysorbate 20 with a concentration of 0.02% (w/v).

[0334] In one embodiment, the buffer is an acetate buffer with a concentration of 10 mM and a pH of 5.6, the fusion protein has the amino acid sequence according to SEQ ID NO. 6, the sugar is trehalose with a concentration of 106 mM and the surfactant is polysorbate 20 with a concentration of 0.02% (w/v).

[0335] In one embodiment, the buffer is an acetate buffer with a concentration of 10 mM and a pH of 5.8, the fusion protein has the amino acid sequence according to SEQ ID NO. 6, the sugar is trehalose with a concentration of 106 mM and the surfactant is polysorbate 20 with a concentration of 0.02% (w/v).

[0336] In one embodiment, the buffer is an acetate buffer with a concentration of 10 mM and a pH of 5.8, the fusion protein has the amino acid sequence according to SEQ ID NO. 6, the sugar is trehalose with a concentration of 250 mM and the surfactant is polysorbate 20 with a concentration of 0.02% (w/v).

[0337] In one embodiment, the buffer is an acetate buffer with a concentration of 20 mM and a pH of 5.6, the fusion protein has the amino acid sequence according to SEQ ID NO. 6, the sugar is trehalose with a concentration of 250 mM and the surfactant is polysorbate 20 with a concentration of 0.02% (w/v).

[0338] In one embodiment, the buffer is an acetate buffer with a concentration of 20 mM and a pH of 5.8, the fusion protein has the amino acid sequence according to SEQ ID NO. 6, the sugar is trehalose with a concentration of 250 mM and the surfactant is polysorbate 20 with a concentration of 0.02% (w/v).

[0339] In one embodiment, the buffer is an acetate buffer with a concentration of 10 mM and a pH of 5.6, the fusion protein has the amino acid sequence according to SEQ ID NO. 6, the sugar is trehalose with a concentration of 250 mM and the surfactant is polysorbate 20 with a concentration of 0.02% (w/v).

[0340] In one embodiment, the buffer is an acetate buffer with a concentration of 10 mM and a pH of 5.8, the fusion protein has the amino acid sequence according to SEQ ID NO. 6, the sugar is trehalose with a concentration of 250 mM and the surfactant is polysorbate 20 with a concentration of 0.02% (w/v).

[0341] In one embodiment, the buffer is an acetate buffer with a concentration of 10 mM and a pH of 5.6, the fusion protein has the amino acid sequence according to SEQ ID NO. 6 and the sugar is sucrose with a concentration of 263 mM.

[0342] In one embodiment, the buffer is an acetate buffer with a concentration of 10 mM and a pH of 5.8, the fusion protein has the amino acid sequence according to SEQ ID NO. 6 and the sugar is sucrose with a concentration of 263 mM.

[0343] In one embodiment, the buffer is an acetate buffer with a concentration of 10 mM and a pH of 5.6, the fusion protein has the amino acid sequence according to SEQ ID NO. 6, the surfactant is polysorbate 20 with a concentration of 0.02% (w/v) and the sugar is sucrose with a concentration of 263 mM.

[0344] In one embodiment, the buffer is an acetate buffer with a concentration of 10 mM and a pH of 5.8, the fusion protein has the amino acid sequence according to SEQ ID NO. 6, the surfactant is polysorbate 20 with a concentration of 0.02% (w/v) and the sugar is sucrose with a concentration of 263 mM.

[0345] In one embodiment, the buffer is an acetate buffer and the fusion protein has the amino acid sequence according to SEQ ID NO. 7.

[0346] In one embodiment, the buffer is an acetate buffer having a pH within the range of 5.6 to 6.0 and the fusion protein has the amino acid sequence according to SEQ ID NO. 7.

[0347] In one embodiment, the buffer is an acetate buffer with a pH of 5.8 and the fusion protein has the amino acid sequence according to SEQ ID NO. 7.

[0348] In one embodiment, the buffer is an acetate buffer with a concentration of 10 to 20 mM and the fusion protein has the amino acid sequence according to SEQ ID NO. 7.

[0349] In one embodiment, the buffer is an acetate buffer with a concentration of 10 to 20 mM and a pH within the range of 5.6 to 6.0 and the fusion protein has the amino acid sequence according to SEQ ID NO. 7.

[0350] In one embodiment, the buffer is an acetate buffer with a concentration of 10 to 20 mM and a pH of 5.8 and the fusion protein has the amino acid sequence according to SEQ ID NO. 7.

[0351] In one embodiment, the buffer is an acetate buffer with a concentration of 10 mM and a pH of 5.8 and the fusion protein has the amino acid sequence according to SEQ ID NO. 7.

[0352] In one embodiment, the buffer is an acetate buffer with a concentration of 10 mM and a pH of 5.8, the fusion protein has the amino acid sequence according to SEQ ID NO. 7 and the sugar is trehalose with a concentration of 250 mM.

[0353] In one embodiment, the buffer is an acetate buffer with a concentration of 10 mM and a pH of 5.8, the fusion protein has the amino acid sequence according to SEQ ID NO. 7 and the surfactant is polysorbate 20 with a concentration of 0.02% (w/v).

[0354] In one embodiment, the buffer is an acetate buffer with a concentration of 10 mM and a pH of 5.8, the fusion protein has the amino acid sequence according to SEQ ID NO. 7, the sugar is trehalose with a concentration of 250 mM and the surfactant is polysorbate 20 with a concentration of 0.02% (w/v).

[0355] In one embodiment, the buffer is an acetate buffer and the fusion protein has the amino acid sequence according to SEQ ID NO: 10.

[0356] In one embodiment, the buffer is an acetate buffer having a pH within the range of 5.6 to 6.0 and the fusion protein has the amino acid sequence according to SEQ ID NO: 10.

[0357] In one embodiment, the buffer is an acetate buffer with a pH of 5.6 and the fusion protein has the amino acid sequence according to SEQ ID NO: 10.

[0358] In one embodiment, the buffer is an acetate buffer with a pH of 5.8 and the fusion protein has the amino acid sequence according to SEQ ID NO: 10.

[0359] In one embodiment, the buffer is an acetate buffer with a concentration of 10 to 20 mM and the fusion protein has the amino acid sequence according to SEQ ID NO: 10.

[0360] In one embodiment, the buffer is an acetate buffer with a concentration of 10 to 20 mM and a pH within the range of 5.6 to 6.0 and the fusion protein has the amino acid sequence according to SEQ ID NO: 10.

[0361] In one embodiment, the buffer is an acetate buffer with a concentration of 10 to 20 mM and a pH of 5.6 and the fusion protein has the amino acid sequence according to SEQ ID NO: 10.

[0362] In one embodiment, the buffer is an acetate buffer with a concentration of 10 to 20 mM and a pH of 5.8 and the fusion protein has the amino acid sequence according to SEQ ID NO: 10.

[0363] In one embodiment, the buffer is an acetate buffer with a concentration of 20 mM and a pH of 5.6, the fusion protein has the amino acid sequence according to SEQ ID NO: 10 and the sugar is trehalose with a concentration of 106 mM.

[0364] In one embodiment, the buffer is an acetate buffer with a concentration of 20 mM and a pH of 5.6, the fusion protein has the amino acid sequence according to SEQ ID NO: 10 and the sugar is trehalose with a concentration of 250 mM.

[0365] In one embodiment, the buffer is an acetate buffer with a concentration of 10 mM and a pH of 5.8, the fusion protein has the amino acid sequence according to SEQ ID NO: 10 and the sugar is trehalose with a concentration of 106 mM.

[0366] In one embodiment, the buffer is an acetate buffer with a concentration of 10 mM and a pH of 5.8, the fusion protein has the amino acid sequence according to SEQ ID NO: 10 and the sugar is trehalose with a concentration of 250 mM.

[0367] In one embodiment, the buffer is an acetate buffer with a concentration of 20 mM and a pH of 5.6, the fusion protein has the amino acid sequence according to SEQ ID NO: 10 and the surfactant is polysorbate 20 with a concentration of 0.02% (w/v).

[0368] In one embodiment, the buffer is an acetate buffer with a concentration of 20 mM and a pH of 5.8, the fusion protein has the amino acid sequence according to SEQ ID NO: 10 and the surfactant is polysorbate 20 with a concentration of 0.02% (w/v).

[0369] In one embodiment, the buffer is an acetate buffer with a concentration of 10 mM and a pH of 5.6, the fusion protein has the amino acid sequence according to SEQ ID NO: 10 and the surfactant is polysorbate 20 with a concentration of 0.02% (w/v).

[0370] In one embodiment, the buffer is an acetate buffer with a concentration of 10 mM and a pH of 5.8, the fusion protein has the amino acid sequence according to SEQ ID NO: 10, the sugar is trehalose with a concentration of 106 mM and the surfactant is polysorbate 20 with a concentration of 0.02% (w/v).

[0371] In one embodiment, the buffer is an acetate buffer with a concentration of 20 mM and a pH of 5.6, the fusion protein has the amino acid sequence according to SEQ ID NO: 10, the sugar is trehalose with a concentration of 106 mM and the surfactant is polysorbate 20 with a concentration of 0.02% (w/v).

[0372] In one embodiment, the buffer is an acetate buffer with a concentration of 20 mM and a pH of 5.8, the fusion protein has the amino acid sequence according to SEQ ID NO: 10, the sugar is trehalose with a concentration of 106 mM and the surfactant is polysorbate 20 with a concentration of 0.02% (w/v).

[0373] In one embodiment, the buffer is an acetate buffer with a concentration of 10 mM and a pH of 5.6, the fusion protein has the amino acid sequence according to SEQ ID NO: 10, the sugar is trehalose with a concentration of 106 mM and the surfactant is polysorbate 20 with a concentration of 0.02% (w/v).

[0374] In one embodiment, the buffer is an acetate buffer with a concentration of 10 mM and a pH of 5.8, the fusion protein has the amino acid sequence according to SEQ ID NO: 10, the sugar is trehalose with a concentration of 106 mM and the surfactant is polysorbate 20 with a concentration of 0.02% (w/v).

[0375] In one embodiment, the buffer is an acetate buffer with a concentration of 10 mM and a pH of 5.8, the fusion protein has the amino acid sequence according to SEQ ID NO: 10, the sugar is trehalose with a concentration of 250 mM and the surfactant is polysorbate 20 with a concentration of 0.02% (w/v).

[0376] In one embodiment, the buffer is an acetate buffer with a concentration of 20 mM and a pH of 5.6, the fusion protein has the amino acid sequence according to SEQ ID NO: 10, the sugar is trehalose with a concentration of 250 mM and the surfactant is polysorbate 20 with a concentration of 0.02% (w/v).

[0377] In one embodiment, the buffer is an acetate buffer with a concentration of 20 mM and a pH of 5.8, the fusion protein has the amino acid sequence according to SEQ ID NO: 10, the sugar is trehalose with a concentration of 250 mM and the surfactant is polysorbate 20 with a concentration of 0.02% (w/v).

[0378] In one embodiment, the buffer is an acetate buffer with a concentration of 10 mM and a pH of 5.6, the fusion protein has the amino acid sequence according to SEQ ID NO: 10, the sugar is trehalose with a concentration of 250 mM and the surfactant is polysorbate 20 with a concentration of 0.02% (w/v).

[0379] In one embodiment, the buffer is an acetate buffer with a concentration of 10 mM and a pH of 5.8, the fusion protein has the amino acid sequence according to SEQ ID NO: 10, the sugar is trehalose with a concentration of 250 mM and the surfactant is polysorbate 20 with a concentration of 0.02% (w/v).

[0380] In one embodiment, the buffer is an acetate buffer with a concentration of 10 mM and a pH of 5.6, the fusion protein has the amino acid sequence according to SEQ ID NO: 10 and the sugar is sucrose with a concentration of 263 mM.

[0381] In one embodiment, the buffer is an acetate buffer with a concentration of 10 mM and a pH of 5.8, the fusion protein has the amino acid sequence according to SEQ ID NO: 10 and the sugar is sucrose with a concentration of 263 mM.

[0382] In one embodiment, the buffer is an acetate buffer with a concentration of 10 mM and a pH of 5.6, the fusion protein has the amino acid sequence according to SEQ ID NO: 10, the surfactant is polysorbate 20 with a concentration of 0.02% (w/v) and the sugar is sucrose with a concentration of 263 mM.

[0383] In one embodiment, the buffer is an acetate buffer with a concentration of 10 mM and a pH of 5.8, the fusion protein has the amino acid sequence according to SEQ ID NO: 10, the surfactant is polysorbate 20 with a concentration of 0.02% (w/v) and the sugar is sucrose with a concentration of 263 mM.

[0384] In one embodiment, the buffer is a histidine buffer and the fusion protein has the amino acid sequence according to SEQ ID NO: 10.

[0385] In one embodiment, the buffer is a histidine buffer having a pH within the range of 5.6 to 6.0 and the fusion protein has the amino acid sequence according to SEQ ID NO: 10.

[0386] In one embodiment, the buffer is a histidine buffer with a pH of 6.0 and the fusion protein has the amino acid sequence according to SEQ ID NO: 10.

[0387] In one embodiment, the buffer is a histidine buffer with a concentration of 10 mM and the fusion protein has the amino acid sequence according to SEQ ID NO: 10.

[0388] In one embodiment, the buffer is a histidine buffer with a concentration of 10 mM and a pH within the range of 5.6 to 6.0 and the fusion protein has the amino acid sequence according to SEQ ID NO: 10.

[0389] In one embodiment, the buffer is a histidine buffer with a concentration of 10 mM and a pH of 6.0 and the fusion protein has the amino acid sequence according to SEQ ID NO: 10.

[0390] In one embodiment, the buffer is a histidine buffer with a pH of 6.0, the sugar is trehalose with a concentration of 220 mM and the fusion protein has the amino acid sequence according to SEQ ID NO: 10.

[0391] In one embodiment, the buffer is a histidine buffer with a pH of 6.0, the sugar is trehalose with a concentration of 250 mM and the fusion protein has the amino acid sequence according to SEQ ID NO: 10.

[0392] In one embodiment, the buffer is a histidine buffer with a pH of 6.0, the sugar is sucrose with a concentration of 145 mM and the fusion protein has the amino acid sequence according to SEQ ID NO: 10.

[0393] In one embodiment, the buffer is a histidine buffer with a concentration of 10 mM and a pH of 6.0, the fusion protein has the amino acid sequence according to SEQ ID NO: 10 and the sugar is trehalose with a concentration of 220 mM.

[0394] In one embodiment, the buffer is a histidine buffer with a concentration of 10 mM and a pH of 6.0, the fusion protein has the amino acid sequence according to SEQ ID NO: 10 and the sugar is trehalose with a concentration of 250 mM.

[0395] In one embodiment, the buffer is a histidine buffer with a concentration of 10 mM and a pH of 6.0, the fusion protein has the amino acid sequence according to SEQ ID NO: 10 and the sugar is sucrose with a concentration of 145 mM.

[0396] In one embodiment, the buffer is a histidine buffer with a concentration of 10 mM and a pH of 6.0, the fusion protein has the amino acid sequence according to SEQ ID NO: 10 and the surfactant is polysorbate 20 with a concentration of 0.02% (w/v).

[0397] In one embodiment, the buffer is a histidine buffer with a concentration of 10 mM and a pH of 6.0, the fusion protein has the amino acid sequence according to SEQ ID NO: 10, the sugar is trehalose with a concentration of 220 mM and the surfactant is polysorbate 20 with a concentration of 0.02% (w/v).

[0398] In one embodiment, the buffer is a histidine buffer with a concentration of 10 mM and a pH of 6.0, the fusion protein has the amino acid sequence according to SEQ ID NO: 10, the sugar is trehalose with a concentration of 250 mM and the surfactant is polysorbate 20 with a concentration of 0.02% (w/v).

[0399] In one embodiment, the buffer is a histidine buffer with a concentration of 10 mM and a pH of 6.0, the fusion protein has the amino acid sequence according to SEQ ID NO: 10, the sugar is sucrose with a concentration of 145 mM and the surfactant is polysorbate 20 with a concentration of 0.02% (w/v).

[0400] In one embodiment, the buffer is an acetate buffer and the fusion protein has the amino acid sequence according to SEQ ID NO. 27.

[0401] In one embodiment, the buffer is an acetate buffer having a pH within the range of 5.6 to 6.0 and the fusion protein has the amino acid sequence according to SEQ ID NO. 27.

[0402] In one embodiment, the buffer is an acetate buffer with a pH of 5.8 and the fusion protein has the amino acid sequence according to SEQ ID NO. 27.

[0403] In one embodiment, the buffer is an acetate buffer with a concentration of 10 to 20 mM and the fusion protein has the amino acid sequence according to SEQ ID NO. 27.

[0404] In one embodiment, the buffer is an acetate buffer with a concentration of 10 to 20 mM and a pH within the range of 5.6 to 6.0 and the fusion protein has the amino acid sequence according to SEQ ID NO. 27.

[0405] In one embodiment, the buffer is an acetate buffer with a concentration of 10 to 20 mM and a pH of 5.8 and the fusion protein has the amino acid sequence according to SEQ ID NO. 27.

[0406] In one embodiment, the buffer is an acetate buffer with a concentration of 10 mM and a pH of 5.8 and the fusion protein has the amino acid sequence according to SEQ ID NO. 27.

[0407] In one embodiment, the buffer is an acetate buffer with a concentration of 10 mM and a pH of 5.8, the fusion protein has the amino acid sequence according to SEQ ID NO. 27 and the sugar is trehalose with a concentration of 250 mM.

[0408] In one embodiment, the buffer is an acetate buffer with a concentration of 10 mM and a pH of 5.8, the fusion protein has the amino acid sequence according to SEQ ID NO. 27 and the surfactant is polysorbate 20 with a concentration of 0.02% (w/v).

[0409] In one embodiment, the buffer is an acetate buffer with a concentration of 10 mM and a pH of 5.8, the fusion protein has the amino acid sequence according to SEQ ID NO. 27, the sugar is trehalose with a concentration of 250 mM and the surfactant is polysorbate 20 with a concentration of 0.02% (w/v).

[0410] In one embodiment, the buffer is an acetate buffer and the fusion protein has the amino acid sequence according to SEQ ID NO. 7, wherein the ACE2 part of the fusion protein is N-glycosylated and 70% to 95% of the N-glycans on the ACE2 part have at least one sialic acid molecule attached thereto.

[0411] In one embodiment, the buffer is an acetate buffer having a pH within the range of 5.6 to 6.0 and the fusion protein has the amino acid sequence according to SEQ ID NO. 7, wherein the ACE2 part of the fusion protein is N-glycosylated and 70% to 95% of the N-glycans on the ACE2 part have at least one sialic acid molecule attached thereto.

[0412] In one embodiment, the buffer is an acetate buffer with a pH of 5.8 and the fusion protein has the amino acid sequence according to SEQ ID NO. 7, wherein the ACE2 part of the fusion protein is N-glycosylated and 70% to 95% of the N-glycans on the ACE2 part have at least one sialic acid molecule attached thereto.

[0413] In one embodiment, the buffer is an acetate buffer with a concentration of 10 to 20 mM and the fusion protein has the amino acid sequence according to SEQ ID NO. 7, wherein the ACE2 part of the fusion protein is N-glycosylated and 70% to 95% of the N-glycans on the ACE2 part have at least one sialic acid molecule attached thereto.

[0414] In one embodiment, the buffer is an acetate buffer with a concentration of 10 to 20 mM and a pH within the range of 5.6 to 6.0 and the fusion protein has the amino acid sequence according to SEQ ID NO. 7, wherein the ACE2 part of the fusion protein is N-glycosylated and 70% to 95% of the N-glycans on the ACE2 part have at least one sialic acid molecule attached thereto.

[0415] In one embodiment, the buffer is an acetate buffer with a concentration of 10 to 20 mM and a pH of 5.8 and the fusion protein has the amino acid sequence according to SEQ ID NO. 7, wherein the ACE2 part of the fusion protein is N-glycosylated and 70% to 95% of the N-glycans on the ACE2 part have at least one sialic acid molecule attached thereto.

[0416] In one embodiment, the buffer is an acetate buffer with a concentration of 10 mM and a pH of 5.8 and the fusion protein has the amino acid sequence according to SEQ ID NO. 7, wherein the ACE2 part of the fusion protein is N-glycosylated and 70% to 95% of the N-glycans on the ACE2 part have at least one sialic acid molecule attached thereto.

[0417] In one embodiment, the buffer is an acetate buffer with a concentration of 10 mM and a pH of 5.8, the fusion protein has the amino acid sequence according to SEQ ID NO. 7, wherein the ACE2 part of the fusion protein is N-glycosylated and 70% to 95% of the N-glycans on the ACE2 part have at least one sialic acid molecule attached thereto, and the sugar is trehalose with a concentration of 250 mM.

[0418] In one embodiment, the buffer is an acetate buffer with a concentration of 10 mM and a pH of 5.8, the fusion protein has the amino acid sequence according to SEQ ID NO. 7, wherein the ACE2 part of the fusion protein is N-glycosylated and 70% to 95% of the N-glycans on the ACE2 part have at least one sialic acid molecule attached thereto, and the surfactant is polysorbate 20 with a concentration of 0.02% (w/v).

[0419] In one embodiment, the buffer is an acetate buffer with a concentration of 10 mM and a pH of 5.8, the fusion protein has the amino acid sequence according to SEQ ID NO. 7, wherein the ACE2 part of the fusion protein is N-glycosylated and 70% to 95% of the N-glycans on the ACE2 part have at least one sialic acid molecule attached thereto, the sugar is trehalose with a concentration of 250 mM and the surfactant is polysorbate 20 with a concentration of 0.02% (w/v).

[0420] In one embodiment, the buffer is an acetate buffer and the fusion protein has the amino acid sequence according to SEQ ID NO. 27, wherein the ACE2 part of the fusion protein is N-glycosylated and 70% to 95% of the N-glycans on the ACE2 part have at least one sialic acid molecule attached thereto.

[0421] In one embodiment, the buffer is an acetate buffer having a pH within the range of 5.6 to 6.0 and the fusion protein has the amino acid sequence according to SEQ ID NO. 27, wherein the ACE2 part of the fusion protein is N-glycosylated and 70% to 95% of the N-glycans on the ACE2 part have at least one sialic acid molecule attached thereto.

[0422] In one embodiment, the buffer is an acetate buffer with a pH of 5.8 and the fusion protein has the amino acid sequence according to SEQ ID NO. 27, wherein the ACE2 part of the fusion protein is N-glycosylated and 70% to 95% of the N-glycans on the ACE2 part have at least one sialic acid molecule attached thereto.

[0423] In one embodiment, the buffer is an acetate buffer with a concentration of 10 to 20 mM and the fusion protein has the amino acid sequence according to SEQ ID NO. 27, wherein the ACE2 part of the fusion protein is N-glycosylated and 70% to 95% of the N-glycans on the ACE2 part have at least one sialic acid molecule attached thereto.

[0424] In one embodiment, the buffer is an acetate buffer with a concentration of 10 to 20 mM and a pH within the range of 5.6 to 6.0 and the fusion protein has the amino acid sequence according to SEQ ID NO. 27, wherein the ACE2 part of the fusion protein is N-glycosylated and 70% to 95% of the N-glycans on the ACE2 part have at least one sialic acid molecule attached thereto.

[0425] In one embodiment, the buffer is an acetate buffer with a concentration of 10 to 20 mM and a pH of 5.8 and the fusion protein has the amino acid sequence according to SEQ ID NO. 27, wherein the ACE2 part of the fusion protein is N-glycosylated and 70% to 95% of the N-glycans on the ACE2 part have at least one sialic acid molecule attached thereto.

[0426] In one embodiment, the buffer is an acetate buffer with a concentration of 10 mM and a pH of 5.8 and the fusion protein has the amino acid sequence according to SEQ ID NO. 27, wherein the ACE2 part of the fusion protein is N-glycosylated and 70% to 95% of the N-glycans on the ACE2 part have at least one sialic acid molecule attached thereto.

[0427] In one embodiment, the buffer is an acetate buffer with a concentration of 10 mM and a pH of 5.8, the fusion protein has the amino acid sequence according to SEQ ID NO. 27, wherein the ACE2 part of the fusion protein is N-glycosylated and 70% to 95% of the N-glycans on the ACE2 part have at least one sialic acid molecule attached thereto, and the sugar is trehalose with a concentration of 250 mM.

[0428] In one embodiment, the buffer is an acetate buffer with a concentration of 10 mM and a pH of 5.8, the fusion protein has the amino acid sequence according to SEQ ID NO. 27, wherein the ACE2 part of the fusion protein is N-glycosylated and 70% to 95% of the N-glycans on the ACE2 part have at least one sialic acid molecule attached thereto, and the surfactant is polysorbate 20 with a concentration of 0.02% (w/v).

[0429] In one embodiment, the buffer is an acetate buffer with a concentration of 10 mM and a pH of 5.8, the fusion protein has the amino acid sequence according to SEQ ID NO. 27, wherein the ACE2 part of the fusion protein is N-glycosylated and 70% to 95% of the N-glycans on the ACE2 part have at least one sialic acid molecule attached thereto, the sugar is trehalose with a concentration of 250 mM and the surfactant is polysorbate 20 with a concentration of 0.02% (w/v).

[0430] The concentration of the ACE2 Fc fusion protein in the liquid pharmaceutical compositions of the present invention is 1-60 mg/mL, preferably 5-50 mg/mL or 8-40 mg/mL, more preferably 10-30 mg/mL or 15-25 mg/mL, and most preferably 20 mg/mL. In another embodiment the concentration of the ACE2 Fc fusion protein in the liquid pharmaceutical compositions of the present invention is 20-60 mg/mL, preferably 30-50 mg/mL, more preferably 40 mg/mL.

[0431] The liquid pharmaceutical composition of the present invention is for medical use, i.e. it is intended to be used to prevent and/or treat a disease.

[0432] As used herein, “treatment” or“treating” is an approach for obtaining beneficial or desired results including clinical results. For purposes of this invention, beneficial or desired clinical results include, but are not limited to, one or more of the following: alleviating one or more symptoms resulting from the disease, diminishing the extent of the disease, stabilizing the disease (e.g., preventing or delaying the worsening of the disease), preventing or delaying the spread of the disease, preventing or delaying the recurrence of the disease, delaying or slowing the progression of the disease, ameliorating the disease state, providing a remission (partial or total) of the disease, decreasing the dose of one or more other medications required to treat the disease, and/or prolonging survival. The use of the present invention contemplates any one or more of these aspects of treatment.

[0433] The term “prevent,” and similar words such as “prevented”, “preventing” etc., indicate an approach for preventing, inhibiting, or reducing the likelihood of the recurrence of, a disease or condition. It also refers to delaying the recurrence of a disease or condition or delaying the recurrence of the symptoms of a disease or condition. As used herein, “prevention” and similar terms also includes reducing the intensity, effect, symptoms and/or burden of a disease or condition prior to recurrence of the disease or condition.

[0434] In one embodiment, the liquid pharmaceutical composition of the present invention is used to prevent and/or treat an infection with a coronavirus binding to ACE2. Coronaviruses are enveloped viruses with a positive sense, single-stranded RNA genome and an icosahedral protein shell. The spike protein consisting of the S1 and S2 subunits forms a homotrimer which projects from the envelope and mediates the interaction with the target cells by binding to ACE2. Coronaviruses often cause respiratory diseases in humans and other mammalian as well as bird species. In humans, seven coronavirus strains are known: HCoV-OC43, HCoV-HKU1, HCoV-229E, HCoV-NL63, MERS-CoV, SARS-CoV and SARS-CoV-2. The first four coronavirus strains (HCoV-OC43, HCoV-HKU1, HCoV-229E, HCoV-NL63) cause only mild symptoms, whereas infection with MERS-CoV, SARS-CoV and SARS-CoV-2 may lead to severe, potentially life-threatening disease.

[0435] It has been shown that SARS-CoV, SARS-CoV-2 and HCoV-NL63 bind to ACE2 and use this binding to enter the target cells (Li et al. (2003) Nature 426(6965): 450-4; Hoffmann et al. (2020) Cell 181: 1-10; Hofmann et al. (2005) Proc Natl Acad Sci USA. 102(22):7988-93). Accordingly, the liquid pharmaceutical composition of the present invention can be used to treat and/or prevent infection with a coronavirus binding to ACE2, in particular infection with SARS-CoV, SARS-CoV-2 or HCoV-NL63. Further coronaviruses binding to ACE2 can be identified by inoculating cells expressing ACE2 either transiently or constitutively with pseudotyped VSV (vesicular stomatitis virus) expressing the coronavirus spike protein and a reporter protein and detecting the activity of the reporter protein after the inoculation period (see protocol in Hoffmann et al. (2020) Cell 181: 1-10). In one embodiment, the liquid pharmaceutical composition of the present invention is used to treat and/or prevent infection with a coronavirus binding to ACE2, wherein the coronavirus binding to ACE2 is not SARS-CoV.

[0436] In one embodiment, the liquid pharmaceutical composition of the present invention is used to treat and/or prevent infection with a coronavirus binding to ACE2, wherein the coronavirus binding to ACE2 is SARS-CoV-2 or a variant of SARS-CoV-2 comprising the amino acid substitution D614G and/or the amino acid substitution N439K. The variant of SARS-CoV-2 comprising the amino acid substitution D614G is described in Korber et al. (2020) Cell 182(4): 812-827 and the amino acid substitution N439K is described in Thomson et al. (https://doi.org/10.1101/2020.11.04.355842). In one embodiment, the liquid pharmaceutical composition of the present invention is used to treat and/or prevent infection with a coronavirus binding to ACE2, wherein the coronavirus binding to ACE2 is a variant of SARS-CoV-2 comprising the amino acid substitution D614G. The amino acid substitution D614G is caused by an A-to-G nucleotide mutation at position 23,403 in the Wuhan reference strain. The numbering of the amino acids in the variants refers to the numbering in the spike protein of SARS-CoV-2 according to SEQ ID No. 17. Hence, a SARS-CoV-2 virus with the Spike protein according to SEQ ID NO: 17 is defined to be the wild-type SARS-CoV-2 from which any variants are derived.

[0437] In one embodiment, the fusion protein of the present invention is used to treat and/or prevent infection with a coronavirus binding to ACE2, wherein the coronavirus binding to ACE2 is a variant of SARS-CoV-2 comprising the amino acid substitution D614G and at least one additional amino acid substitution. In one embodiment, the fusion protein of the present invention is used to treat and/or prevent infection with a coronavirus binding to ACE2, wherein the coronavirus binding to ACE2 is a variant of SARS-CoV-2 comprising the amino acid substitutions D614G, N501Y, A570D, P681H, T7161, S982A and D1118H and comprising a deletion of amino acids 69, 70 and 145. In one embodiment, the fusion protein of the present invention is used to treat and/or prevent infection with a coronavirus binding to ACE2, wherein the coronavirus binding to ACE2 is a variant of SARS-CoV-2 comprising the amino acid substitutions D614G, Y453F, 1692V and M12291 and comprising a deletion of amino acids 69 and 70. In one embodiment, the fusion protein of the present invention is used to treat and/or prevent infection with a coronavirus binding to ACE2, wherein the coronavirus binding to ACE2 is a variant of SARS-CoV-2 comprising the amino acid substitutions D614G, S131, W152C and L452R. In one embodiment, the fusion protein of the present invention is used to treat and/or prevent infection with a coronavirus binding to ACE2, wherein the coronavirus binding to ACE2 is a variant of SARS-CoV-2 comprising the amino acid substitutions D614G, E484K and V1176F. In one embodiment, the fusion protein of the present invention is used to treat and/or prevent infection with a coronavirus binding to ACE2, wherein the coronavirus binding to ACE2 is a variant of SARS-CoV-2 comprising the amino acid substitutions D614G, L18F, T20N, P26S, D138Y, R190S, K417T, E484K, N501Y, H655Y, T1027I and V1176F. In one embodiment, the fusion protein of the present invention is used to treat and/or prevent infection with a coronavirus binding to ACE2, wherein the coronavirus binding to ACE2 is a variant of SARS-CoV-2 comprising the amino acid substitutions D614G, D80A, D215G, K417N, E484K, N501Y and A701V and comprising a deletion of amino acids 242, 243 and 244. In one embodiment, the fusion protein of the present invention is used to treat and/or prevent infection with a coronavirus binding to ACE2, wherein the coronavirus binding to ACE2 is a variant of SARS-CoV-2 comprising the amino acid substitutions D614G, L18F, D80A, D215G, K417N, E484K, N501Y and A701V and comprising a deletion of amino acids 242, 243 and 244. In one embodiment, the fusion protein of the present invention is used to treat and/or prevent infection with a coronavirus binding to ACE2, wherein the coronavirus binding to ACE2 is a variant of SARS-CoV-2 comprising the amino acid substitutions D614G, D80A, R2461, K417N, E484K, N501Y and A701V and comprising a deletion of amino acids 242, 243 and 244. In one embodiment, the fusion protein of the present invention is used to treat and/or prevent infection with a coronavirus binding to ACE2, wherein the coronavirus binding to ACE2 is a variant of SARS-CoV-2 comprising the amino acid substitutions E484Q and L452R. In one embodiment, the fusion protein of the present invention is used to treat and/or prevent infection with a coronavirus binding to ACE2, wherein the coronavirus binding to ACE2 is a variant of SARS-CoV-2 comprising the amino acid substitutions E484K and D614G and comprising a deletion of amino acids 145 and 146.

[0438] In one embodiment, the fusion protein of the present invention is used to treat and/or prevent infection with a coronavirus binding to ACE2, wherein the coronavirus binding to ACE2 is a variant of SARS-CoV-2 comprising the amino acid substitutions T19R, R158G, L452R, T478K, D614G, P681R and D950N and comprising a deletion of amino acids 156 and 157.

[0439] In one embodiment, the fusion protein of the present invention is used to treat and/or prevent infection with a coronavirus binding to ACE2, wherein the coronavirus binding to ACE2 is a variant of SARS-CoV-2 comprising the amino acid substitutions K417N, N440K, G446S, S477N, T478K, E484A, Q493K, G496S, Q498R, N501Y, Y505H and P681H.

[0440] In one embodiment, the fusion protein of the present invention is used to treat and/or prevent infection with a coronavirus binding to ACE2, wherein the coronavirus binding to ACE2 is a variant of SARS-CoV-2 comprising the amino acid substitutions A67V, T951, Y145D, L2121, G339D, S371L, S373P, S375F, Q493R, T547K, D614G, H655Y, N679K, N764K, D796Y, N856K, Q954H, N969K, L981F.

[0441] In one embodiment, the fusion protein of the present invention is used to treat and/or prevent infection with a coronavirus binding to ACE2, wherein the coronavirus binding to ACE2 is a variant of SARS-CoV-2 comprising the amino acid deletions N211, Y144, V143, G142, V70, H69.

[0442] The route of administration is in accordance with known and accepted methods, e.g., injection or infusion by subcutaneous, intravenous, intraperitoneal, intramuscular, intra-arterial, intralesional or intraarticular routes. In another embodiment the liquid pharmaceutical composition of the present invention is to be administered intranasally, e.g. by means of a nasal spray, a nasal ointment or nasal drops. In another embodiment, the liquid pharmaceutical composition on protein of the present invention is administered by topical administration or by inhalation. Preferably, the liquid pharmaceutical composition of the present invention is administered by intravenous injection or infusion.

[0443] Dosages and desired drug concentrations of pharmaceutical compositions of the present invention may vary depending on the particular use envisioned. The determination of the appropriate dosage or route of administration is well within the skill of an ordinary artisan. Animal experiments provide reliable guidance for the determination of effective doses for human therapy. Interspecies scaling of effective doses can be performed following the principles laid down by Mordenti, J. and Chappell, W. “The Use of Interspecies Scaling in Toxicokinetics,” In Toxicokinetics and New Drug Development, Yacobi et al., Eds, Pergamon Press, New York 1989, pp. 42-46.

[0444] In one embodiment, the liquid pharmaceutical composition of the present invention is administered intravenously at a dosage of 0.1 mg/kg body weight to 4 mg/kg body weight, such as a dosage of 0.1 mg/kg body weight, 0.2 mg/kg body weight, 0.3 mg/kg body weight, 0.4 mg/kg body weight, 0.5 mg/kg body weight, 0.6 mg/kg body weight, 0.7 mg/kg body weight, 0.8 mg/kg body weight, 0.9 mg/kg body weight, 1.0 mg/kg body weight, 1.1 mg/kg body weight, 1.2 mg/kg body weight, 1.3 mg/kg body weight, 1.4 mg/kg body weight, 1.5 mg/kg body weight, 1.6 mg/kg body weight, 1.7 mg/kg body weight, 1.8 mg/kg body weight, 1.9 mg/kg body weight, 2.0 mg/kg body weight, 2.1 mg/kg body weight, 2.2 mg/kg body weight, 2.3 mg/kg body weight, 2.4 mg/kg body weight, 2.5 mg/kg body weight, 2.6 mg/kg body weight, 2.7 mg/kg body weight, 2.8 mg/kg body weight, 2.9 mg/kg body weight, 3.0 mg/kg body weight, 3.1 mg/kg body weight, 3.2 mg/kg body weight, 3.3 mg/kg body weight, 3.4 mg/kg body weight, 3.5 mg/kg body weight, 3.6 mg/kg body weight, 3.7 mg/kg body weight, 3.8 mg/kg body weight, 3.9 mg/kg body weight or 4.0 mg/kg body weight, the mg referring to the mg of the ACE2 Fc fusion protein delivered with the liquid pharmaceutical composition. Preferably, the liquid pharmaceutical composition of the present invention is administered intravenously at a dosage of 2.5 mg/kg body weight, the mg referring to the mg of the ACE2 Fc fusion protein delivered with the liquid pharmaceutical composition. Preferably, the liquid pharmaceutical composition is diluted in a saline solution before administration. In one embodiment, the saline solution comprises sodium chloride at a total amount of 0.4 to 1.5% (w/v), preferably 0.6 to 1.0% (w/v), more preferably 0.9% (w/v).

[0445] In one embodiment, the liquid pharmaceutical composition of the present invention is administered intravenously at a dosage of 10 mg/kg body weight to 150 mg/kg body weight, such as a dosage of 10 mg/kg body weight, 15 mg/kg body weight, 20 mg/kg body weight, 25 mg/kg body weight, 30 mg/kg body weight, 35 mg/kg body weight, 40 mg/kg body weight, 45 mg/kg body weight, 50 mg/kg body weight, 55 mg/kg body weight, 60 mg/kg body weight, 65 mg/kg body weight, 70 mg/kg body weight, 75 mg/kg body weight, 80 mg/kg body weight, 85 mg/kg body weight, 90 mg/kg body weight, 95 mg/kg body weight, 100 mg/kg body weight, 105 mg/kg body weight, 110 mg/kg body weight, 115 mg/kg body weight, 120 mg/kg body weight, 125 mg/kg body weight, 130 mg/kg body weight, 135 mg/kg body weight, 140 mg/kg body weight, 145 mg/kg body weight or 150 mg/kg body weight, the mg referring to the mg of the ACE2 Fc fusion protein delivered with the liquid pharmaceutical composition. Preferably, the liquid pharmaceutical composition of the present invention is administered intravenously at a dosage of 15 mg/kg body weight, the mg referring to the mg of the ACE2 Fc fusion protein delivered with the liquid pharmaceutical composition. Preferably, the liquid pharmaceutical composition is diluted in a saline solution before administration. In one embodiment, the saline solution comprises sodium chloride at a total amount of 0.4 to 1.5% (w/v), preferably 0.6 to 1.0% (w/v), more preferably 0.9% (w/v).

[0446] The liquid pharmaceutical composition may be administered once per day, twice per day, three times per day, every other day, once per week or once every two weeks.

[0447] The liquid pharmaceutical composition may be administered for a period of three days, four days, five days, six days, seven days, eight days, nine days or ten days.

[0448] By administering the liquid pharmaceutical composition of the present invention, the infection with a coronavirus and in particular with SARS-CoV-2 is treated, i.e. at least one of the symptoms of an infection with SARS-CoV-2 is reduced or abolished. Symptoms of an infection with SARS-CoV-2 include coughing, shortness of breath, difficulty breathing, fever, chills, tiredness, muscle aches, sore throat, headache, chest pain and loss of smell and/or taste. In one embodiment, by the administration of the fusion protein of the present invention the fever caused by infection with SARS-CoV-2 is reduced. In one embodiment, the administration of the liquid pharmaceutical composition of the present invention to a subject reduces the risk that the subject experiences a severe course of infection with SARS-CoV-2. In one embodiment, the administration of the liquid pharmaceutical composition of the present invention to a subject reduces the risk that the subject experiences multi-organ failure, acute respiratory distress syndrome (ARDS) or pneumonia. In one embodiment, the administration of the liquid pharmaceutical composition of the present invention to a subject reduces the risk that the subject experiences long-term effects of the infection with SARS-CoV-2 such as lung damage, neurological disorders, dermatological disorders and cardiovascular disease. In one embodiment, the administration of the liquid pharmaceutical composition of the present invention to a subject reduces the concentration of the cytokines IL6 and/or IL8 in the blood. In one embodiment, the administration of the fusion protein of the present invention to a subject reduces the concentration of SARS-CoV-2 virus particles in the blood. In one embodiment, the administration of the fusion protein of the present invention to a subject stimulates the production of antiviral antibodies. In one embodiment, the administration of the fusion protein of the present invention to a subject stimulates the production of antiviral IgA and/or IgG antibodies.

[0449] In one embodiment, the fusion protein of the present invention is administered to a subject suffering from a severe infection with SARS-CoV-2. In one embodiment, the fusion protein of the present invention is administered to a subject infected with SARS-CoV-2 and requiring artificial ventilation. In one embodiment, the fusion protein of the present invention is administered to a subject infected with SARS-CoV-2 and requiring extracorporeal membrane oxygenation (ECMO).

[0450] By administering the fusion protein of the present invention, the infection with a coronavirus and in particular with SARS-CoV-2 is prevented, i.e. the treated subject does not develop symptoms of an infection with SARS-CoV-2.

[0451] In one embodiment, the fusion protein of the present invention is administered to a subject which has been in contact with a subject infected with SARS-CoV-2. Subjects which have been in contact with a subject infected with SARS-CoV-2 can be identified by use of a “Corona warning app” installed on the smartphone.

[0452] In one embodiment, the fusion protein of the present invention is administered to a subject for which a test with a throat swab of said subject indicates that it is infected with SARS-CoV-2, but which has not developed any symptoms of an infection with SARS-CoV-2.

[0453] In the treatment or prevention of an infection with a coronavirus binding to ACE2 and in particular SARS-CoV-2 the fusion protein of the present invention may be combined with a known anti-viral agent. Anti-viral agents are medicaments used to treat viral infections and include both specific anti-viral agents and broad-spectrum viral agents. Suitable anti-viral agents include, but are not limited to, nucleoside analogs, inhibitors of viral protease, inhibitors of viral polymerase, blockers of virus entry into the cell, Janus kinase inhibitors, but also inhibitors of inflammatory mediators.

[0454] In specific embodiments, the anti-viral agent is selected from the group consisting of remdesivir, arbidol HCl, ritonavir, lopinavir, darunavir, ribavirin, chloroquin and derivatives thereof such as hydroxychloroquin, nitazoxanide, camostat mesilate, anti-IL6 and anti-IL6 receptor antibodies such as tocilizumab, siltuximab and sarilumab and baricitinib phosphate.

[0455] In the treatment or prevention of an infection with SARS-CoV-2 the pharmaceutical composition of the present invention may further contain or be combined with an anti-SARS-CoV-2 monoclonal antibody. Anti-SARS-CoV2 monoclonal antibodies include, but are not limited to, bamlanivimab (LY-CoV555 20; LY3819253;) developed by Eli Lilly and Company, etesevimab (LY-3832479; LY-COV016; JS-016; NP-005), REGN-COV2 which is a cocktail of REGN10933 (casivirimab) and REGN10987 (imdevimab) and which is developed by Regeneron, sotrovimab (VIR-7831; GSK4182136;) developed by Vir Biotechnology and GlaxoSmithKline, CT-P59 developed by Celltrion, AZD 7442 which is a combination of antibodies AZD8895 and AZD1061 and which is developed by Astra Zeneca, JS016 developed by Junshi Biosciences, TY027 developed 25 by Tychan Pte Ltd, BRII-96 and BRII-98 developed by Brii Biosciences, SCTA01 developed by Sinocelltech Ltd, ADM03820 developed by Ology Bioservices, B1767551 developed by Boehringer Ingelheim and others and COR-101 developed by Corat Therapeutics, Paxlovid (PF-07321332; ritonavir) developed by Pfizer Inc.

[0456] Apart from its function in binding coronaviruses, ACE2 has also been implicated in several disorders and diseases such as hypertension (including high blood pressure), congestive heart failure, chronic heart failure, acute heart failure, contractile heart failure, myocardial infarction, arteriosclerosis, kidney failure, renal failure, Acute Respiratory Distress Syndrome (ARDS), Acute Lung Injury (ALI), chronic obstructive pulmonary disease (COPD), pulmonary hypertension, renal fibrosis, chronic renal failure, acute renal failure, acute kidney injury, inflammatory bowel disease and multi-organ dysfunction syndrome. Hence, the fusion protein of the present invention can also be used in the treatment of these disorders and diseases.

[0457] The pharmaceutical compositions may be supplied in a vial or in a pre-filled syringe. The pharmaceutical compositions may be administered by intravenous infusion, e.g. over a period of 30 minutes or less. The pharmaceutical compositions may be administered by intravenous infusion, e.g. over a period of 30 minutes to 1 hour, preferably 1 hour.

[0458] While the invention has been illustrated and described in detail in the drawings and foregoing description, such illustration and description are to be considered illustrative or exemplary and not restrictive. The invention is not limited to the disclosed embodiments. Other variations to the disclosed embodiments can be understood and effected by those skilled in the art in practicing a claimed invention, from a study of the drawings, the disclosure, and the dependent claims.

[0459] The detailed description is merely exemplary in nature and is not intended to limit application and uses. The following examples further illustrate the present invention without, however, limiting the scope of the invention thereto. Various changes and modifications can be made by those skilled in the art on the basis of the description of the invention, and such changes and modifications are also included in the present invention.

### EXAMPLES

[0460] Suitable liquid pharmaceutical formulations of two ACE2-IgG4-fusion proteins (construct v1261 and construct v1263, see sequences according to SEQ ID Nos. 6 and 10) were identified in a 5-step procedure.

[0461] As described in example 1 25 different compositions were screened for highest melting temperature and aggregation tendency for each of the two ACE2-IgG4-fusion proteins in order to identify optimal conditions and excipients to provide stability against thermal unfolding and aggregation.

[0462] As described in example 2, the two ACE2-IgG4-Fusion proteins were subjected to different thermal conditions (incubation for different periods at 37° C. and a freeze/thaw study) in a standard formulation. Physical and chemical modifications (see example 2) were monitored with a set of analytical methods.

[0463] In example 3 one formulation based on the outcome of example 1 was tested during cell line development of constructs v1261 and v1263 with regard to thermal stability and melting temperature.

[0464] Based on quality attributes identified in example 2 and their monitoring methods and preferred excipients identified in example 1, new sets of formulations were created which are described in examples 4 and 5. The two ACE2-IgG4-fusion constructs were transferred into these formulations and evaluated during a stability study at different temperatures and stress conditions for best stabilizing effects regarding physico-chemical stability and potency.

[0465] Example 6 confirms that formulation 4a (Table 12) can also be used for an ACE2 fusion protein with the Fc part of human IgG1 (v1260, SEQ ID NO: 7). Moreover, short-term stability in formulation 4a was analysed for different ACE2-IgG1 constructs (v1260, SEQ ID NO 7, v1328, SEQ ID NO 27) and results are shown in Example 7.

[0466] In Example 8 the stability of a normal sialylated and a highly sialylated ACE2 fusion protein) with the Fc part of human IgG4 (v1261, SEQ ID NO: 6) in a selected formulation is investigated.

[0467] In Example 9 results of stability studies of ACE2(18-732)-IgG4 normal sialylation (v1261, SEQ ID NO 6) in formulation 4a are shown for the following conditions:
[0468] F/T: 3 cycles at −76° C.±9° C. and RT
[0469] up to 6 months at 76° C.±9° C.
[0470] up to 6 months at 5° C.±3° C. and 25° C.±2° C./60% RH±5% RH as well as up to 3 months at 40° C.±2° C./75% RH±5% RH).

[0471] Description of Analytical Methods:

[0472] 1. NanoDSF

[0473] 1.1 Materials

| Description | Supplier |
|---|---|
| Nanotemper NT.48 | Prometheus |
| capillaries | |

[0474] 1.2 Analysis
[0475] Samples were dialyzed and subsequently diluted in the buffer (0.02% PS20, 30 mM L-Arginine hydrochloride, 250 mM trehalose dihydrate, 5 mM L-Methionine, 50 mM NaCl, 10 mM Acetic acid pH 5.8) to a concentration of 1 mg/mL.
[0476] Capillaries were immersed in sample solution until capillaries were fully filled with the sample (approximately 10 μL), and carefully checked for air bubbles. Capillaries with air bubbles were discarded and replaced.
[0477] When all samples were loaded, ThermControl software was started and a discovery scan was performed to determine the required light intensity.
[0478] 25% light intensity was selected.
[0479] Temperature was ramped from 20° C. to 95° C. A 1.0° C./min slope was set
[0480] ThermStability software was used for data analysis

[0481] 2. Size Exclusion Chromatography

[0482] 2.1 Materials

| Description | Supplier |
|---|---|
| Acetonitrile | Biosolve |
| Sodium Phosphate monobasic, anhydrous | Acros organics |
| Sodium phosphate dibasic, anhydrous | Acros organics |
| Sodium Chloride | Merck |
| Waters Acquity BEH SEC guard column | Waters |
| 200 Å, 1.7 μm, 4.6 mm × 30 mm 10K-500K | |
| Waters Acquity BEH SEC column 200 Å, | Waters |
| 1.7 μm, 4.6 mm × 150 mm, 10K-500K | |

[0483] 2.2 Analysis

[0484] Solvents:
[0485] Mobile phase A: 20 mM Sodium phosphate, 150 mM sodium chloride, pH 7.0 Sample preparation:
[0486] Sample concentration: about 1 mg/ml Instrumental parameters:
[0487] System: Acquity H-class+ bio, equipped with extended column oven, TUV detector
[0488] UV detection: dual wavelength, 214 and 280 nm, sampling rate: 2 points/sec/

[0489] 3. Anion Exchange Chromatography

[0490] 3.1 Materials

| Description | Supplier |
|---|---|
| Propac WAX-10, 2 × 250 mm, | Thermo Scientific |
| 10 μm particle size | |
| Tris HCl | Merck |
| Tris base | Merck |
| Sodium Chloride | Merck |

[0491] 3.2 Analysis

[0492] Solvents:
[0493] Mobile phase A: 20 mM Tris pH 8.5
[0494] Mobile phase B: 20 mM Tris pH 8.5+2M NaCl

[0495] Sample Preparation:
[0496] Blank: Mobile phase A+Mobile phase B in 95:5 ratio
[0497] Sample concentration: around 1.0 mg/mL

[0498] Instrumental Parameters:
[0499] System: Acquity H-class+ bio, equipped with extended column oven, TUV detector
[0500] Column: Propac WAX-10, 2×250 mm
[0501] Linear gradient starting from 2.5% to 100% of buffer B was used.

[0502] 4. CE-SDS Non-Reduced

[0503] 4.1 Materials

| Name | Supplier/vendor |
|---|---|
| Iodoacetamide | Sigma-Aldrich |
| Pre-assembled capillary cartridge (Bare-fused silica, | Beckman Coulter |
| 50 μm i.d., 30 cm total length, 10 cm effective | |
| length) | |
| N-ethylmaleimide | Sigma |
| Sodium dodecyl sulfate | Merck |
| SDS-MW gel buffer | Beckman Coulter |
| Tris Base | Merck |

[0504] 4.2 Sample Preparation:
[0505] Sample buffer: 100 mM Tris pH 9.0-2% SDS
[0506] Mastermix: 50 μL sample buffer, 2 μL Internal standard (10 kDa), 5 μL 250 mM Iodoacetamide; to be multiplied by the number of samples for analysis (+10% additional volume)
[0507] 45 μL sample mixed with 57 μL Mastermix, Incubation: 90° C.-10 minutes

[0508] 4.3 Analysis:
[0509] System: CESI 8000, Sciex.
[0510] Detector: PDA detection, 220 nm±10 nm, data rate: 2 Hz

[0511] 5. Binding ELISA (Detection of ACE2-IgG4 Constructs)

[0512] 5.1 Materials

| Product Name | Supplier/vendor |
|---|---|
| 96 well plate (NUNC) | Thermo Scientific |
| Coating: 2019-nCoV S-protein | Acro Biosystems |
| Detection antibody: GaHu | Southern Biotech |
| IgG4-HRP | |
| Wash buffer 20× stock | Pierce |

Wash buffer 1× = 10 mM sodium phosphate, 0.15M NaCl, 0.05% Tween-20, pH 7.5

[0513] 5.2 Analysis
[0514] Coat 96 well plate (NUNC).
[0515] Next day remove coating and wash plate 3× (300 μL/well) with wash buffer
[0516] Block wells with 200 μL/well block buffer (wash buffer supplemented with 1% BSA) and incubate for 1 h at RT and 150 rpm
[0517] Remove block buffer (flick off plate)
[0518] Apply 100 μL/well sample (preparative duplicates) and incubate for 1 h at RT and 150 rpm (Concentration range: 5.00-1.67-0.56-0.19-0.062-0.021-0.0069-0.0023-0.00076-0.00025-0.000085-0 μg/mL)
[0519] Wash plate 3× (300 μL/well) with wash buffer
[0520] Apply detection Ab (diluted 1/4000 in block buffer) and incubate for 1 h at RT and 150 rpm
[0521] Wash plate 3× (300 μL/well) with wash buffer
[0522] Apply TMB solution (required volume prewarmed at RT) and incubate at RT for 2 min
[0523] Stop reaction with 1 M HCl
[0524] Incubate for 15 min at RT and protected from light
[0525] Measure OD 450 nm and reference at OD 655 nm using a microplate reader (Synergy HTX, BioTek)
[0526] Plot ACE2-Fc concentrations (in μg/mL) on x-axis against OD 450 nm (after subtraction of background values=no ACE2-Fc) on y-axis using a 4-parameter logistic curve fit model

[0527] 6. Binding ELISA (Detection of ACE2-IgG1 Constructs)

[0528] 6.1 Materials

| Product Name | Supplier/vendor |
|---|---|
| 96 well plate (NUNC) | Thermo Scientific |
| Coating: 2019-nCoV S-protein | Acro Biosystems |
| Detection antibody: GaHu | Jackson ImmunoResearch |
| IgG, Fcy fragment - HRP | |
| Wash buffer 20× stock | Pierce |

Wash buffer 1× = 10 mM sodium phosphate, 0.15M NaCl, 0.05% Tween-20, pH 7.5

[0529] 6.2 Analysis
[0530] Coat 96 well plate (NUNC).
[0531] Next day remove coating and wash plate 3× (300 μL/well) with wash buffer
[0532] Block wells with 200 μL/well block buffer (wash buffer supplemented with 1% BSA) and incubate for 1 h at RT and 150 rpm
[0533] Remove block buffer (flick off plate)
[0534] Apply 100 μL/well sample (preparative duplicates) and incubate for 1 h at RT and 150 rpm (Concentration range: 5.00-1.67-0.56-0.19-0.062-0.021-0.0069-0.0023-0.00076-0.00025-0.000085-0 μg/mL)
[0535] Wash plate 3× (300 μL/well) with wash buffer
[0536] Apply detection Ab (diluted 1/5000 in block buffer) and incubate for 1 h at RT and 150 rpm
[0537] Wash plate 3× (300 μL/well) with wash buffer
[0538] Apply TMB solution (required volume prewarmed at RT) and incubate at RT for 2 min
[0539] Stop reaction with 1 M HCl
[0540] Incubate for 15 min at RT and protected from light
[0541] Measure OD 450 nm and reference at OD 655 nm using a microplate reader (Synergy HTX, BioTek)
[0542] Plot ACE2-Fc concentrations (in μg/mL) on x-axis against OD 450 nm (after subtraction of background values=no ACE2-Fc) on y-axis using a 4-parameter logistic curve fit model

[0543] 7. Analytical Ultracentrifugation

[0544] 7.1 Method Description

[0545] The aim of analytical ultracentrifugation (AUC) in the applied setup is the analysis of protein aggregation and degradation by sedimentation velocity analysis. In sedimentation velocity, the movement of solutes in high centrifugal fields is interpreted using hydrodynamic theory to define the size, shape and interactions of macromolecules. During the centrifugation process the analyzed sample is monitored in real time through an optical detection system. This allows to observe the sample concentration versus the axis of rotation profile as a result of the applied centrifugal field. It offers the possibility to report on the shape and molar mass of the dissolved protein, as well as its size-distribution. Sedimentation velocity experiments are performed with an Optima AUC (Beckman Coulter) analytical ultracentrifuge equipped with an An-Ti 50 rotor and absorbance optics. The sample was diluted to 0.5 g/L with the corresponding formulation buffer. The experiments are performed in independent triplicate measurements at 20° C. for 300 min with a rotor speed of 40.000 rpm. UV absorbance detection is performed at 280 nm with a scan interval of 2 min. The distribution of sedimentation coefficients and molecular weights were determined mathematically using the c(s) model. The molecular weight of sample species can be calculated using the following relation

M=sRT/[D(1−v̅ρ)]

where s is the sedimentation coefficient, R the gas constant, D the diffusion coefficient, T the absolute temperature, v̅ the partial specific volume, and ρ is the solvent density. D can be determined directly from the shape of the sedimentation band.

[0546] 7.2 Data Analysis

[0547] Data analysis was performed with the program Sedfit (P. Schuck (2000) Biophys. Journal 78:1606-1619). The following fitting parameters were applied:

| Parameter for AryoSeven ™ lots | Value | |
|---|---|---|
| Density of formulation buffer | 1.03360 | g/mL |
| Viscosity of formulation buffer | 0.01370 | Poise |
| v̅^{protein} (partial specific volume) | 0.73 | mL/g |

| | |
|---|---|
| Wash buffer 20× stock | Pierce |

[0548] Density and viscosity were calculated with the program Sednterp (20120828 BETA, Hurton et al.) based on the available formulation components.

[0549] The noise and the baseline of the obtained data, as well as the sample meniscus and the frictional ratio were fitted during sample analysis, while the cell bottom distance value was fixed. The obtained sedimentation distribution was afterwards plotted using the GUSSI tool.

[0550] 8. cIEF

[0551] 8.1 Materials and Equipment

| Description | Manufacturer |
|---|---|
| iCE electrolyte kit | Bio-Techne AG |
| 0.5% Methylcellulose | Bio-Techne AG |
| 1% Methylcellulose | Bio-Techne AG |
| Servalyt 3-10, 40% (w/v) Solution in Water | Serva |
| Servalyt 3-6, 40% (w/v) Solution in Water | Serva |
| Lyophilized cIEF pl marker: pl 3.38 | Bio-Techne AG |
| Lyophilized cIEF pl marker: pl 5.85 | Bio-Techne AG |
| cIEF cartridge | Bio-Techne AG |
| Maurice cIEF/CE-SDS Instrument | ProteinSimple |

[0552] 8.2 Method Description

[0553] Charged variants of recombinant protein products often include post-translational modifications such as glycosylation, phosphorylation, oxidation, deamidation or lysine clipping. During the whole process and storage, the protein molecules could be exposed to physico-chemical stresses, resulting in the formation of charge variants caused by oxidation or deamidation. These modifications contribute to the full charge profile of the protein and may have an effect on the biological activity of the molecule. cIEF is a fast high resolution technique to separate these charged proteins (e.g. isoforms) within a pH gradient. A mixture of ampholytes and proteins is injected into a capillary of nL volume, and an electrical current is applied to induce the formation of the pH gradient. Proteins migrate within the gradient according to their pI and are detected by measuring the absorbance (at 280 nm) or fluorescence (Extinction 280, Emission 320-450 nm) along the entire length of the capillary.

[0554] The principle of cIEF was applied for the determination of identity and purity of the protein. The following conditions were used and the following settings were applied:
[0555] Buffer exchange to: 50 mM Tris, 50 mM NaCl, pH 7.2
[0556] Mastermix:
   [0557] 0.35% Methylcellulose
   [0558] 4% Servalyte 3-6
   [0559] 2% Servalyte 3-10%
   [0560] 20% Sucrose (out of 67m % (20° C.) stock solution)
   [0561] 2% pI-Marker 3.38
   [0562] 2% pI-Marker 5.85
[0563] Method: 1.0 min, 1500 Volt (focusing), 10.0 min 3000 Volt (separation)
[0564] Exposure for data evaluation: Fluorescence, 10 seconds

[0565] 9. Compendial Methods

[0566] Compendial methods were conducted according to European Pharmacopoeia (Ph. Eur.):
[0567] Visible particles (Ph. Eur. 2.9.20)
[0568] Subvisible particles (Ph. Eur. 2.9.19)
[0569] pH (Ph. Eur. 2.2.3)
[0570] Color (Ph. Eur. 2.2.2)
[0571] Clarity (Ph. Eur. 2.2.1)
[0572] Osmolality, (Ph. Eur. 2.2.35)

[0573] 10. Determination of Protein Concentration

[0574] Absorbance spectroscopy serves as a fast and convenient method to determine the concentration of proteins in solution. Proteins in solution absorb ultraviolet light with absorbance maxima around 280 nm (aromatic amino acids) and 200 nm (peptide bonds). Using Lambert-Beer's Law (A_{280 nm}=ε_{280 nm}*c*d) and the specific extinction coefficient of the protein (ε₂₈₀), the proteins' concentration can be calculated from a solutions' absorbance.

[0575] This principle was used for concentration determinations using different equipments (NanoDrop, SoloVPE and a UV/Vis Spectrophotometer (OD280)).

[0576] 11. Enzymatic Activity Assay:

[0577] 11.1 Materials and Equipment

| | Supplier |
|---|---|
| Product Name | |
| ACE2 activity kit | Abcam |
| 96-well assay plates UV Star | Greiner |
| (black, flat bottom, COC, | |
| transparent) | |
| Instrument | |
| Microplate Reader | Tecan |
| Magellan 7.3 | Tecan |

[0578] 11.2 Reagent Preparation

| Product Name | Storage | Description |
|---|---|---|
| ACE2 assay buffer - 25 mL | −20° C. or 4° C. | Brought to RT before use. |
| ACE2 dilution buffer - 1.5 mL | −20° C. or 4° C. | Brought to RT before use. |
| ACE2 lysis buffer - 50 mL | −20° C. or 4° C. | Brought to RT before use. |
| ACE2 positive control - 5 μL | −20° C. | Before use, 95 μL of ACE2 |
| | | dilution Buffer was added to |
| | | the ACE2 Positive Control vial. |
| | | Multiple F/T of the enzyme was |
| | | avoided and the enzyme was |
| | | used within 3 months. |
| ACE2 substrate - 200 μL | −20° C. | Thawed before use. |
| ACE2 inhibitor - 50 μL | −20° C. | Brought to RT before use. |
| | | 170 μL ACE2 Assay Buffer was |
| | | added to the ACE2 Inhibitor vial |
| | | and mixed properly at RT. |
| | | Multiple F/T of the inhibitor |
| | | was avoided and the inhibitor |
| | | was used within 3 months. |
| MCA standard - 15 μL | −20° C. | Thawed before use. |

[0579] 11.3 Method Description

[0580] The principle of the ACE2 activity assay is based on the cleavage of a synthetic peptide substrate (MCA) by 5 ng active ACE2 (FYB207) over 20 minutes. The principle of the ACE activity assay is applied for the determination of enzymatic activity of the ACE2-IgG fusion protein.

[0581] Standard:
[0582] 1) A 25 μM solution of MCA-Standard was prepared by diluting 5 μL of 1 mM MCA-Standard with 195 μL of ACE2 Assay Buffer.
[0583] 2) 0, 2, 4, 6, 8 and 10 μL of 25 μM MCA-Standard was added into a series of wells in a 96-well plate and adjusted to a final volume to 100 μL/well with ACE2 Assay Buffer. Therefore, 0, 50, 100, 150, 200 and 250 pmol/well of MCA Standard was generated, respectively.

UM
Assay

| | 25 μM MCA | ACE2 Assay | MCA |
|---|---|---|---|
| Standard | Standard (μL) | Buffer (μL) | (pmol/well) |
| 1 | 10 | 90 | 250 |
| 2 | 8 | 92 | 200 |
| 3 | 6 | 94 | 150 |
| 4 | 4 | 96 | 100 |
| 5 | 2 | 98 | 50 |
| 6 | 0 | 100 | 0 |

[0584] 3) After mixing, the fluorescence (Ex/Em=320/420 nm) was measured in an end point mode adjusting the gain to be 80% of the maximum value that can be measured by the plate reader for the highest MCA concentration.

[0585] Assay:

[0586] 1) The samples were diluted in 50 mM Tris-150 mM NaCl buffer pH 7.5 to the appropriate concentration.
[0587] Pre-dilution to 0.05 mg/mL.
[0588] Further dilution to 0.0025 mg/mL

[0589] 2) All samples+controls were prepared in the ACE2 assay buffer:
[0590] Negative control (=blank): 2 μL 50 mM Tris-150 mM NaCl buffer pH 7.5+48 μL ACE2 assay buffer
[0591] Positive control: 2 μL Positive control+48 μL ACE2 assay buffer
[0592] Samples: 2 μL diluted sample+48 μL ACE2 assay buffer

[0593] 3) Samples were incubated 15 minutes at RT.

[0594] 4) MCA substrate mix preparation for the desired number of wells.

[0595] Substrate mix for 1 well: 2 μL ACE2 substrate+48 μL ACE2 assay buffer.

[0596] 5) 50 μL of ACE2 Substrate mix was added into each of the Sample, Positive Control and Negative Control wells and mixed

[0597] 6) Fluorescence (Ex/Em=320/420 nm) was measured in kinetic mode for 2 hours at room temperature with the gain determined using the standard curve.

[0598] 7) linear region of the kinetic curve was selected (first 20 minutes).

[0599] 8) Difference in RFU at the beginning and the end of this selected linear region (first 20 minutes) was determined.

[0600] 9) The blank measurement was subtracted from the kinetic measurements with the ACE2-Fc samples.

[0601] 10) This RFU value should be within the linear range of the standard curve.

[0602] 11) The linear fit of the standard curve was used to determine the amount of MCA that was cleaved by the enzymes

[0603] 12. CE-SDS Non-Reduced Applied within Example 9:

[0604] 12.1 Materials and Equipment

| | Manufacturer |
|---|---|
| Equipment | |
| Maurice cIEF/CE-SDS Instrument | ProteinSimple |
| Reagents and consumables | |
| Application Kit PLUS | Bio-Techne AG |
| CE-SDS PLUS Cartridge | |
| 25× Internal Standard | Bio-Techne AG |
| CE-SDS IgG Standard | Bio-Techne AG |

[0605] 12.2 Method and Sample Preparation

[0606] Capillary electrophoresis with sodiumdodecyl sulfate (CE-SDS) is a fast high resolution technique to separate SDS-protein complexes within a polymer matrix according to their mass-to-charge ratio. The SDS-protein complexes migrate into a matrix-filled capillary of nL volume to which an electrical current is applied. Small proteins run faster within the matrix and larger proteins more slowly. Proteins are detected by measuring the absorbance (at 280 nm) at the end of the capillary. The Maurice cIEF/CE-SDS instrument from ProteinSimple was used.

[0607] The principle of CE-SDS is applied for the determination of purity of ACE2-Fc. The following conditions and optimal running parameters were used.
[0608] Buffer exchange to: 50 mM Tris, 50 mM NaCl, pH 7.2
[0609] SDS-Buffer for final dilution: CE-SDS PLUS 1× Sample buffer
[0610] Alkylation: 10 min, 70° C.
[0611] Separation at 5750V: non-reduced=40 min

[0612] 12. SE-HPLC Applied within Example 9:

[0613] 12.1 Materials and Equipment
[0614] U(H)PLC system from Waters
[0615] Running buffer: 1×PBS, 0.1 M NaCl, PH 7.0

[0616] 12.2 Method Description

[0617] The principle of (ultra) high performance liquid chromatography ((U) HPLC) is based on interaction and differential partition of the sample between the mobile liquid phase and the stationary phase. For SE-UPLC, separation is based on the molecular size or hydrodynamic volume of the components. Molecules that are too large for the pores of the porous packing material in the column elute first, small molecules that enter the pores elute last. The elution times of e.g. impurities or buffer components depend on their relative size.

[0618] The principle of SE-UPLC is applied for the determination of purity as well as impurities of ACE2-Fc. The following conditions were used for testing.
[0619] Mobile phase: 1×PBS, 0.1 M NaCl, pH 7.0
[0620] Column: ACQUITY UPLC Protein BEH SEC column, 200 Å, 1.7 μm, 4.6×150 mm
[0621] Method: isocratic 0.3 mL/min
[0622] Detection wave length: 214 nm and 280 nm

### Example 1: Screening of 25 Formulations by Melting Temperature and Aggregation

[0623] 1. Sample Preparation

[0624] 1 mg of each of the two constructs v1261 and v1263, both at a concentration of 1 mg/mL in 50 mM TRIS, 150 mM sodium chloride, pH 7.5, were concentrated to 8 mg/mL by spin filtration. The protein concentration was confirmed by OD spectrophotometry. Afterwards, all samples were transferred by dialysis into 20 mM MOPS, 150 mM sodium chloride, pH 7.5. Finally, the protein concentration of the dialyzed products was again determined by OD280, yielding 7.5 mg/mL.

[0625] In the next step 25 different formulation were produced. For this a FORMOscreen buffer kit from 2bind GmbH, Regensburg, Germany (Cat. 2BBT-001) was used, which allows preparation of formulations based on a multiplate format. Initially, the individual components were mixed according to the user manual with the following slight modification to scale down the sample volume: 4.40 μl of each 5× buffer stock was mixed in a 96 well plate with 14.60 μl of ultrapure water, 3.0 μl of the respective ACE2-IgG4-fusion construct (v1261 or v1263, protein concentration: 7.5 mg/mL) were added and mixed. By doing this in total 22 μl with a final protein concentration of 1 mg/mL were prepared in formulations according to Table 1.

TABLE 1
Overview formulation screening

| Formulation | Tonicity agent/stabilizer | Buffering system | Surfactant | pH |
|---|---|---|---|---|
| A4 | 263 mM Sucrose | 10 mM Glacial acetic | 0.1% (w/v) | pH 5.8 |
| | | acid | PS 80 | |
| A5 | 198 mM Sorbitol | 40 mM L-Histidine | 0.01% (w/v) | pH 5.8 |
| | | | PS 80 | |
| A7 | 159 mM Trehalose | 42 mM Sodium | 0.04% (w/v) | pH 6.0 |
| | | phosphate monobasic | PS 20 | |
| | | dihydrate | | |
| | | 8.5 mM Sodium | | |
| | | phosphate dibasic | | |
| | | anhydros | | |
| A8 | 58.4 mM Sucrose | 46 mM L-Histidine | 3.00% PEG- | pH 6.2 |
| | 50 mM L-Arginine | | 3350 | |
| | 133 mM Glycine | | | |
| A10 | 131 mM Sucrose | 17.8 mM TRIS | 0.009% (w/v) | pH 8.6 |
| | 9.2 mM NaCl | | PS 80 | |
| B7 | 270 mM Sucrose | 55 mM L-Histidine | 0.06% (w/v) | pH 6.1 |
| | | | PS 80 | |
| B8 | 252 mM Sorbitol | 10 mM L-Histidine | 0.05% (w/v) | pH 6.4 |
| | 10 mM L-Methionine | | PS 80 | |
| B11 | 146 mM Sucrose | 20 mM L-Histidine | 0.2% (w/v) | pH 6.1 |
| | 30.1 mM L-Arginine HCl | 12.2 mM Sodium | PS 80 | |
| | | acetate | | |
| C1 | 29.2 mM Sucrose | 30.3 mM L-Arginine | n.a. | pH 6.2 |
| | 120 mM Sodium chloride | HCl | | |
| C4 | 251 mM Trehalose | 20 mM L-Histidine | 0.006% (w/v) | pH 6.3 |
| | | | PS 20 | |
| C11 | 204 mM Sucrose | 10 mM L-Histidine | 0.05% (w/v) | pH 6.0 |
| | | | PS 80 | |
| C12 | 275 mM Trehalose | 25.8 mM L-Histidine | 0.02% (w/v) | pH 6.3 |
| | | | PS 80 | |
| D4 | 146 mM Sucrose | 20.9 mM L-Histidine | 0.2% (w/v) | pH 6.1 |
| | 45 mM L-Arginine | | PS 20 | |
| D10 | 146 mM Sucrose | 10 mM L-Histidine | 0.2% (w/v) | pH 5.9 |
| | 130 mM Proline | | PS 80 | |
| D11 | 106 mM Trehalose | 4.2 mM Glacial acetic | 0.02% (w/v) | pH 5.6 |
| | | acid | PS 20 | |
| | | 15.7 mM Sodium | | |
| | | acetate | | |
| D12 | 88.5 mM Sorbitol | 4.1 mM L-Histidine | 0.47% (w/v) | pH 6.3 |
| | | | PEG-3350 | |
| F5 | 225 mM Sorbitol | 9.8 mM L-Histidine | 0.015% (w/v) | pH 6.0 |
| | | | PS 80 | |
| F8 | 248 mM Sucrose | 10 mM L-Histidine | 0.04% (w/v) | pH 5.9 |
| | 2.7 mM L-Methionine | | PS 80 | |
| | 0.06 mM Na2-EDTA | | | |
| G8 | 200 mM Trehalose | 34.8 mM L-Histidine | 0.02% (w/v) | pH 6.0 |
| | 5 mM L-Methionine | | PS 80 | |
| G10 | 240 mM Trehalose | 40 mM L-Histidine | 0.02% (w/v) | pH 5.9 |
| | | | Poloxamer | |
| | | | 188 | |
| H1 | 264 mM Trehalose | 47.7 mM L-Histidine | 0.01% (w/v) | pH 5.4 |
| | | | PS 20 | |
| H3 | 50 mM Mannitol | 10 mM Citric acid/ | 0.01% (w/v) | pH 5.8 |
| | 40 mM NaCl | sodium citrate | PS 80 | |
| | 133 mM Glycine | | | |
| H4 | 300 mM Glycine | 2.1 mM Citric acid | 0.02% (w/v) | pH 6.3 |
| | | | PS 80 | |
| H7 | 304 mM Sucrose | 17.8 mM L-Histidine | 0.036% (w/v) | pH 6.1 |
| | | | PS 20 | |
| H11 | 100 mM NaCl | 39.6 mM Succinic acid/ | 0.03% (w/v) | pH 6.2 |
| | | Disodium succinate | PS 80 | |

[0626] According to Table 1 the following excipients were tested as stabilizer/tonicity agent in addition to the buffering systems: sucrose, trehalose, mannitol, sorbitol, amino acids L-arginine, glycine, proline, L-methionine, and sodium chloride. The concentrations and mixtures of all these substances were varied within the formulations according to Table 1.

[0627] The following excipients were tested as buffering systems to adjust pH: histidine/histidine HCl, sodium citrate/citric acid, disodium succinate/succinic acid, sodium acetate/acetic acid, sodium phosphate monobasic/sodium phosphate dibasic, L-arginine HCl and Tris. Amino acids mentioned above in category “stabilizer” can also act as a buffering agent. Concentrations of buffering systems are shown in Table 1, pH values of the formulations were varied between 5.4 and 8.6.

[0628] The following excipients were tested as surfactant: Polysorbate 20, Polysorbate 80, Poloxamer 188 and PEG-3350. The concentrations in this example were varied between 0.009% (w/v) to 0.2% (w/v) for polysorbate 80, 0.006% (w/v) to 0.2% (w/v) for polysorbate 20, 0.47% (w/v) to 3.00% (w/v) for PEG-3350, and for Poloxamer 188 a concentration of 0.02% (w/v) was used. Also a formulation without using any surfactant was evaluated (Cl). For further information see Table 1.

[0629] In addition methionine (2.7 mM to 10 mM) and sodium EDTA (0.06 mM) were included in some formulations to prevent the two ACE2 constructs from oxidation.

[0630] Both constructs (v1261 and v1263) formulated in the 25 formulations according to Table 1 were analysed for their melting temperature and the generation of insoluble aggregates.

[0631] 2. Melting Point Determination by NanoDSF and Aggregation Measurements

[0632] The conformational stability is a key parameter for prediction of long-term stability of proteins and was used herein to identify first formulation candidates for the ACE2-IgG4-fusion constructs. Melting temperatures of both constructs (v1261 and v1263) in the 25 formulations according to Table 1 were quantified with a Prometheus NT.48 nanoDSF instrument and PR.ThermControl-CFR software from Nanotemper GmbH. The Prometheus instrument analyzes protein unfolding transitions based on detection of intrinsic fluorescence changes under label free conditions. It measures changes in the fluorescence of tryptophan and tyrosine residues of the ACE2 Fc fusion proteins during thermal denaturation at wavelengths of 330 nm and 350 nm. Usually, the tryptophan and tyrosine residues are located in the hydrophobic core of the protein when it is in the native state. By increasing the temperature the conformation of the protein changes from a native folded to an unfolded state. The temperature where this transition occurs is called melting point and is used for estimating the thermal stability of the protein. The melting point temperature Tₒₙₛₑₜ temperature is defined as the temperature at which the protein starts to denature due to changes in folding, Tₘ indicates the melting temperature at which half of protein population is unfolded

[0633] In addition to the assessment of thermal stability by NanoDSF also the generation of insoluble aggregates can be monitored by back-reflection in the same capillary. Aggregates are scattering the light when illuminated. Measuring the loss of the intensity of the light beam after passing through the sample gives an indication of the aggregation level. From the data generated while ramping the temperature, the aggregation onset temperatures (T_{agg-on}) are determined.

[0634] Capillaries were filled with the samples according to Table 1 (all comprising 1 mg/mL of the construct) by capillary force and scanned. The measurement parameters are shown in Table 2.

TABLE 2
Measurement parameters

| Parameter | Setting | |
|---|---|---|
| Temperature slope | 1° | C./min |
| Start temperature | 20° | C. |
| End temperature | 95° | C. |

[0635] Melting points Tₘ and unfolding onset temperature were calculated by Software PR-ThermControl-CFR from Nanotemper. Each sample was analyzed in a single measurement. Table 3 summarizes the mean of the different quality attributes for construct v1261, Table 5 summarizes results for construct v1263. Ten best performing formulations for each parameter were ranked from (1)-(10) and are additionally shown in bold letters.

TABLE 3
Stability assessment of v1261 by DSF measurements

| Formulation number | T_{m, onset} [° C] | Tₘ [° C] | T_{agg-on} [° C] |
|---|---|---|---|
| A4 | 51.1 (3) | 56.9 (3) | 69.1 (3) |
| A5 | 46.2 | 52.7 | 51.4 |
| A7 | 52.0 (1) | 58.9 (1) | 66.1 (6) |
| A8 | 46.9 | 52.5 | 54.7 |
| A10 | 46.8 | 53.2 | n.a.**) |
| B7 | 47.9 | 54.1 | 59.5 |
| B8 | 46.2 | 53.7 | n.a. |
| B11 | 47.5 | 53.8 | 56.7 |
| C1 | 48.8 (5) | 54.3 | 65.6 (7) |
| C4 | 48.6 (7) | 55.1 (5) | 66.8 (4) |
| C11 | 48.3 (9) | 55.1 (5) | 60.0 |
| C12 | 48.7 (6) | 55.0 (8) | 65.6 (7) |
| D4 | 46.7 | 53.1 | 57.0 |
| D10 | 47.8 | 54.7 | 56.9 |
| D11 | 50.2 (4) | 56.6 (4) | 62.5 (10) |
| D12 | 46.8 | 54.4 | n.a.**) |
| F5 | 48.2 | 55.0 (8) | 60.2 |
| F8 | 47.2 | 53.8 | 60.6 |
| G8 | 47.8 | 54.1 | 57.8 |
| G10 | 47.7 | 54.1 | 54.0 |
| H1 | 44.2 | 51.6 | 52.4 |
| H3 | 48.4 (8) | 54.3 | 69.4 (3) |
| H4 | 47.8 | 54.9 (10) | 66.2 (5) |
| H7 | 48.3 (9) | 55.1 (5) | 65.0 (9) |
| H11 | 51.6 (2) | 58.0 (2) | 72.5 (1) |

(1)-(10) best ten results within criteria; if several formulations are on tenth position all of them will be included in the rating
**)no results applicable, no scattering readout possible

[0636] Analyzing the samples of v1261 with the Prometheus system produced the following results (for detailed results see Table 3):

[0637] Formulations H11, A4, A7, D11 and C12 comprise highest melting temperature within the 25 tested formulation for v1261 (see Table 4) which is preferred for developing long term stable formulations of the v1261 construct. Surprisingly, these formulations can comprise either a sugar as stabilizer or can be based on a sugar-free sodium chloride formulation (H11). That means, solutions containing a sugar like trehalose and sucrose as stabilizer comprise melting behavior comparable to sugar free formulations containing sodium chloride as tonicity agent.

[0638] The use of Sorbitol (e.g. Formulation A5, B8), Mannitol (H3), Glycine (H3) and Proline (D10) did not improve stability evaluated by nanoDSF.

TABLE 4
Best five formulation candidates for melting temperatures (v1261)

| Formulation | Tonicity agent/stabilizer | Buffering system | Surfactant | pH |
|---|---|---|---|---|
| A7 | 159 mM Trehalose | 42 mM Sodium | 0.04% (w/v) | pH 6.0 |
| | | phosphate monobasic | PS 20 | |
| | | dihydrate | | |
| | | 8.5 mM Sodium | | |
| | | phosphate dibasic | | |
| | | anhydros | | |
| H11 | 100 mM NaCl | 39.6 mM Succinic acid/ | 0.03% (w/v) | pH 6.2 |
| | | Disodium succinate | PS 80 | |
| A4 | 263 mM Sucrose | 10 mM Glacial acetic acid | 0.1% (w/v) | ph 5.8 |
| | | | PS 80 | |
| D11 | 106 mM Trehalose | 4.2 mM Glacial acetic | 0.02% (w/v) | pH 5.6 |
| | | acid | PS 20 | |
| | | 15.7 mM Sodium acetate | | |
| C12 | 275 mM Trehalose | 25.8 mM L-Histidine | 0.02% (w/v) | pH 6.3 |
| | | | PS 80 | |

[0639] Surprisingly formulation C1 containing L-Arginine (see Table 2) as excipient in addition to sucrose and sodium chloride led also to high T_{agg-on}, showing promising stability against aggregation compared to other tested formulations, even though this formulation does not contain any surfactant.

[0640] Surfactants polysorbate 20 and polysorbate 80 worked comparably in the screening in the tested ranges, both were superior compared to the use of Poloxamer 188 and PEG-3350. Also formulations without using any surfactant led to a stable formulation (C1).

[0641] The optimum pH of the solution was determined to be in a range between 5.6 and 6.3. Identified suitable buffer systems for this based on results from Table 3 are: Histidine/Histidine HCl (see formulations C4, C11 and C12), Acetic acid/sodium acetate (see formulation A4), sodium phosphate monobasic/sodium phosphate dibasic (see formulation A7) and Succinic acid/Disodium succinate (see formulation H11).

[0642] Analyzing the v1263 samples with the Prometheus system produced the following results (for detailed results see Table 5):

TABLE 5
Stability assessment of v1263 by DSF measurements

| Formulation number | T_{m, onset} [° C] | Tₘ [° C] | T_{agg-om} [° C] |
|---|---|---|---|
| A4 | 44.4 | 50.4 | 71.4 (1) |
| A5 | 45.3 | 50.7 | 52.3 |
| A7 | 46.3 (9) | 51.6 (10) | 68.1 (5) |
| A8 | 45.8 | 50.6 | 52.4 |
| A10 | 37.0 | 44.1 | n.a.**) |
| B7 | 46.7 (2) | 51.9 (6) | 62.6 |
| B8 | 43.4 | 49.0 | n.a.**) |
| B11 | 45.8 | 51.1 | 59.1 |
| C1 | 43.4 | 48.3 | 70.9 (2) |
| C4 | 46.6 (3) | 52.1 (4) | 67.9 (6) |
| C11 | 46.1 (10) | 51.8 (8) | 64.6 |
| C12 | 47.1 (1) | 52.3 (1) | 69.1 (3) |
| D4 | 45.2 | 50.4 | 59.3 |
| D10 | 45.8 | 51.6 (10) | 63.3 |
| D11 | 45.8 | 51.5 | 66.0 (10) |
| D12 | 43.6 | 49.1 | n.a.**) |
| F5 | 45.9 | 51.7 (9) | 65.4 |
| F8 | 46.4 (5) | 52.2 (2) | 63.6 |
| G8 | 46.4 (5) | 51.9 (6) | 59.4 |
| G10 | 46.4 (5) | 52.0 (5) | 55.4 |
| H1 | 44.0 | 49.8 | 50.2 |
| H3 | 46.6 (3) | 51.5 | 68.4 (4) |
| H4 | 45.2 | 50.9 | 67.2 (7) |
| H7 | 46.4 (5) | 52.2 (2) | 66.2 (9) |
| H11 | 45.7 | 50.5 | 67.1 (8) |

(1)-(10) best ten results within criteria; if several formulations are on tenth position all of them are included in the rating
**)no results applicable, no scattering readout possible

[0643] Formulations C12, B7, H7, C4, F8 and H3 comprise highest melting temperature within the 25 tested formulation for v1263 which is preferred for developing long term stable formulations of the v1263 construct (see Table 5). Most of the formulations are based on Histidine as buffering agent, in combination with sugars like trehalose or sucrose as stabilizer and polysorbate 20 or polysorbate 80 high melting points could be achieved (see Table 6)

[0644] The use of sorbitol (e.g. Formulation A5, B8) and proline (D10) did not improve stability evaluated by nanoDSF.

[0645] Surprisingly formulation C1 containing L-Arginine (see Table 2) as excipient in addition to sucrose and sodium chloride led to one of the highest T_{agg-on}, showing very promising stability against aggregation compared to other tested formulations, even though this formulation does not contain any surfactant (see Table 5). Formulation A4 led to highest T_{agg-on} and seems promising for preventing aggregation.

[0646] Surfactants polysorbate 20 and polysorbate 80 worked comparably in the screening in the tested ranges, both were superior compared to the use of Poloxamer 188 and PEG-3350.

[0647] The optimum pH of the solution was determined to be in a range between 5.8 and 6.3. Identified suitable buffer systems for this based on results from Table 5 are: Histidine/Histidine HCl (see formulations B7, H7, F8, C4 and C12), Acetic acid (see formulation A4) and Citric acid/sodium citrate (see formulation H3).

TABLE 6
Best formulation candidates for melting temperatures (v1263)

| Formulation | Tonicity agent/stabilizer | Buffering system | Surfactant | pH |
|---|---|---|---|---|
| C12 | 275 mM Trehalose | 25.8 mM L-Histidine | 0.02% (w/v) | pH 6.3 |
| | | | PS 80 | |
| B7 | 270 mM Sucrose | 55 mM L-Histidine | 0.06% (w/v) | pH 6.1 |
| | | | PS 80 | |
| H7 | 304 mM Sucrose | 17.8 mM L-Histidine | 0.036% (w/v) | pH 6.1 |
| | | | PS 20 | |
| F8 | 248 mM Sucrose | 10 mM L-Histidine | 0.04% (w/v) | pH 5.9 |
| | 2.7 mM L-Methionine | | PS 80 | |
| | 0.06 mM Na2-EDTA | | | |
| C4 | 251 mM Trehalose | 20 mM L-Histidine | 0.006% (w/v) | pH 6.3 |
| | | | PS 20 | |
| H3 | 50 mM Mannitol | 10 mM Citric acid/ | 0.01% (w/v) | pH 5.8 |
| | 40 mM NaCl | sodium citrate | PS 80 | |
| | 133 mM Glycine | | | |
| A4 | 263 mM Sucrose | 10 mM Glacial acetic | 0.1% (w/v) | pH 5.8 |
| | | acid | PS 80 | |
| C1 | 29.2 mM Sucrose | 30.3 mM L-Arginine | n.a. | pH 6.2 |
| | 120 mM NaCl | HCl | | |

### Example 2

[0648] Accelerated Stability and Freeze-Thaw Program of ACE2-IgG4-Fusion Constructs v1261 and v1263 to Identify Critical Attributes by Physico-Chemical Analytical Methods

[0649] ACE2-IgG4-fusion constructs v1261 and v1263 were formulated in 50 mM TRIS, 150 mM sodium chloride, pH 7.5. The concentration of each construct was adjusted to 1 mg/mL and verified by UV-Vis spectroscopy at 280 nm.

[0650] The constructs at a concentration of 1 mg/mL in the above formulation were filled into polypropylene vials and stored at 37° C. for up to 6 weeks to identify degradation pathways and evaluate possible formulation strategies to optimize stability of the ACE2-IgG4-FC constructs against those molecule modifications. Additionally, both constructs (v1261 and v1263) were stressed by a freeze/thaw cycle to evaluate the influence of this processing step on protein stability.

[0651] After storage or stress treatment the samples were analyzed by size exclusion chromatography (SE-HPLC) for the presence of high molecular weight species (HMWS) and by non-reducing sodium dodecyl sulfate capillary electrophoresis (CE-SDS) for the presence of fragments and HMWS. Peptide mapping was used to quantify modifications by oxidation and deamidation.

[0652] Analysis of High Molecular Weight Species (HMWS) by SE-HPLC

[0653] 15 μg of each sample were applied onto an ACQUITY UPLC Protein BEH SEC 200 Å, 1.7 μm, 4.6 mm×150 mm, 10K-500K column to detect high molecular weight species of the two ACE2-IgG4-FC fusion constructs. A guard column ACQUITY UPLC Protein SEC Guard Column 200 Å, 1.7 μm, 4.6 mm×30 mm, 10K-500K was used to protect the main column.

[0654] The protein was eluted by isocratic elution using 20 mM sodium phosphate buffer with 150 mM sodium chloride (pH 7.0) with a flow rate of 0.3 mL/min at 30° C. Eluted species were detected at a wavelength of 280 nm and displayed on a graph showing the concentration of the eluted species vs. time. The elution profile showed a main peak with the non-aggregated protein and peaks of the protein representing higher molecular weight forms of the protein. The areas of all peaks were determined.

[0655] Table 7 shows the percentage of peak area for the HMWS in relation to the total peak area of the eluted species for the samples v1261 and v1263.

TABLE 7
Percentage of HMWS via SE-HPLC after storage
at 37° C. for different periods

| | |
|---|---|
| Construct v1261 | Construct v1263 |

| condition | HMWS [%] | condition | HMWS [%] |
|---|---|---|---|
| T0 | 2.1 | T0 | 3.1 |
| 1 w 37° C. | 9.1 | 1 w 37° C. | 7.5 |
| 3 w 37° C. | 9.9 | 3 w 37° C. | 9.0 |
| 6 w 37° C. | 8.8 | 6 w 37° C. | 13.8 |
| Freeze/Thaw | 5.9 | Freeze/Thaw | 4.0 |

[0656] The generation of HMWS increased strongly already after 1 week storage at 37° C., a clear trend to aggregation is visible. Also after conducting a freeze/thaw cycle HMWS were increased, indicating that the constructs are not stable against freezing.

[0657] Both ACE2-IgG4-Fc constructs are prone to aggregation. Based on these results an improvement of the formulation against aggregation is necessary, the use of excipients and conditions identified in example 1 is necessary to develop a long-term stable formulation.

[0658] Detection of High Molecular Weight Species (HMWS) and Low Molecular Weight Species (LMWS) by SDS-cGE Non-Reduced

[0659] Capillary gel electrophoresis was carried out by using a CESI8000 system from ABSciex in order to quantify low molecular weight species (LMWS) and covalently linked high molecular weight species (HMWS) in samples. A sample buffer comprising 100 mM Tris pH 9.0 with 2% SDS was used. A mastermix was created by using 50 μl of sample buffer, adding 2 μl internal standard and 5 μl 250 mM iodoacetamide. Each sample to be analyzed (1 mg/mL) was mixed with 57 μl of the mastermix solution.

[0660] For analysis the sample was injected by pressure injection (5 psi, 65 s). SDS-cGE was performed by forward injection into a neutral, bare fused silica capillary with an effective length of 10 cm. Separation was performed for 25 minutes at −15 kV with a capillary temperature of 25° C. Prior to analysis the sample was heat denatured at 90° C. for 10 minutes.

[0661] UV absorption was measured at 220 nm. Data were evaluated in terms of peak integration using the 32Karat software (Beckman Coulter). Peak areas were determined as velocity-corrected relative peak areas, considering the fact that in capillary electrophoresis early peaks migrate faster through the detector window than later peaks. Sample peak integration was performed in comparison to the electropherogram of a formulation buffer or pure water blank to identify and exclude non-protein-specific peaks.

TABLE 8
Percentage of LMWS via CE-SDS non-reduced after
storage at 37° C. for different periods

| | Construct v1261 | | Construct v1263 | |
|---|---|---|---|---|
| condition | LMWS [%] | HMWS [%] | LMWS [%] | HMWS [%] |
| T0 | 2.7 | 0.0 | 4.9 | 0.0 |
| 1 w 37° C. | 3.3 | 0.0 | 4.8 | 0.2 |
| 3 w 37° C. | 3.9 | 0.0 | 5.3 | 0.3 |
| 6 w 37° C. | 5.4 | 0.0 | 7.0 | 0.4 |
| Freeze/Thaw | 3.0 | 0.0 | 4.8 | 0.0 |

[0662] According to Table 8 LMWS increased in both constructs during storage at 37° C. In v1261 no HMWS were detected during the incubation period, in v1263 a slight increase of HMWS could be observed. By applying a freeze/thaw cycle to both constructs no LMWS or HMWS were generated.

[0663] Based on these results both constructs are shown to be prone to fragmentation and monitoring this critical quality attribute by non-reduced CE-SDS has to be considered in the next formulation round (see example 4).

[0664] Detection of Oxidation and Deamidation by LC-MS Peptide Mapping

[0665] Quantification of oxidative modifications and deamidations in both constructs v1261 and v1263 was performed by Peptide Mapping.

[0666] Each sample (20 μg) was diluted to 1 mg/mL in sample buffer. The sample buffer consisted of 20 mM Tris pH 7.8, 1 mM EDTA and 15 mM L-methionine. Samples were reduced by adding 42 μl of 8 M Guanidine HCl (prepared in 100 mM Tris pH 7.8, 5.5 mM DTT) for 1 hour at 4° C. After that alkylation was performed by adding 5.5 μl of 150 mM iodoacetamide and storing the samples for 30 minutes at room temperature in the dark. Both ACE2-IgG4-FC fusion constructs were digested by adding 240 μl sample buffer, 5 μl of 1 μg/μl enzyme solutions of both Trypsin and recombinant Lys-C and incubation for 4 hours at 37 C. After incubation 17 μl of a 20% formic acid solution were added.

[0667] For sample analysis by LC-MS peptide mapping 42.5 μl of the samples (2.5 μg) were applied onto an ACQUITY Peptide BEH C18, 130 Å, 1.7 μm, 2.1×150 mm column.

[0668] For liquid chromatography a gradient from 5% to 43% acetonitrile within 60 minutes was used at a flow rate of 0.2 mL/min. Mobile phase A consisted of 0.1% formic acid in Milli-Q water, mobile phase B consisted of 0.1% formic acid in acetonitrile. The separation was conducted with a column temperature of 50° C. Seal wash/Purge was conducted with 80/20 Acetronitrile/Milli-Q water.

[0669] For measurement the following parameters were used:
[0670] 100-2000 m/z
[0671] Capillary: 3 kV
[0672] Sample cone: 25 V
[0673] Source temperature: 100° C.
[0674] Desolvation temperature: 250° C.
[0675] Desolvation gas flow: 500 L/h
[0676] Low CE method: MS: 6 V, MSE: 15-30 V
[0677] High CD method: MS: 6 V, MSE: 60-100 V

[0678] After that UNIFY database was used to search against known protein sequences for coverage maps. The extracted ion current (XIC) method for all peptides with a potential methionine oxidation site or asparagine deamidation site was used for evaluation regarding quantification of those modifications in the constructs v1261 and v1263 during storage at 37° C. and after a freeze/thaw cycle.

TABLE 9
Percentage of methionine oxidation in construct v1261 analyzed
by LC-MSpeptide mapping after storage at 37° C. for different
periods and afterfreeze thaw
Construct v1261

| | Peptide T5 | Peptide | Peptide T57 | Peptide T68 |
|---|---|---|---|---|
| condition | (area %) | T19 (area %) | (area %) | (area %) |
| T0 | 1.0 | 0.9 | 0.3 | 0.5 |
| Freeze/Thaw | 1.0 | 0.6 | 0.2 | 0.4 |
| 1 w 37° C. | 1.8 | 0.9 | 0.4 | 0.5 |
| 6 w 37° C. | 4.7 | 2.1 | 1.1 | 1.1 |

TABLE 10
Percentage of methionine oxidation in construct v1263 analyzed
by LC-MS peptide mapping after storage at 37° C. for different
periods and after freeze thaw
Construct v1263

| | Peptide T5 | Peptide T19 | Peptide T57 | Peptide T68 |
|---|---|---|---|---|
| condition | (area %) | (area %) | (area %) | (area %) |
| T0 | 1.0 | 0.8 | 0.3 | 0.4 |
| Freeze/Thaw | 1.1 | 0.7 | 0.2 | 0.3 |
| 1 w 37° C. | 2.2 | 1.1 | 0.4 | 0.5 |
| 6 w 37° C. | 5.7 | 2.2 | 1.3 | 1.1 |

[0679] At storage at 37° C. an increase in methionine oxidation in both constructs v1261 and v1263 could be demonstrated by LC-MS peptide mapping (see Tables 9 and 10). Both constructs were stable against methionine oxidations after applying a freeze/thaw cycle.

[0680] Methionine oxidation occurred in the following peptides:
[0681] T5: EQSTLAQMYPLQEIQNLTVK
[0682] T19: LMNAYPSYISPIGCLPAHLLGDMWGR
[0683] T57: NQMILFGEEDVR
[0684] T68: DTLMISR

[0685] Based on the results of Tables 9 and 10 both constructs are shown to be prone to oxidation and for monitoring this critical quality attribute by LC-MS peptide mapping has to be considered in the next formulation round (see example 4). An improvement of the formulation against oxidation is necessary, the use of antioxidants identified in example 1 or conditions to prevent oxidation is necessary to develop a long term stable formulation.

TABLE 11
Percentage of asparagine deamidation in constructs v1261
and v1263 analyzed by LC-MS peptide mapping after storage
at 37° C. for different periods and after freeze thaw

| | Construct v1261 | | Construct v1263 | |
|---|---|---|---|---|
| | Peptide | Peptide | Peptide | Peptide |
| | T64-66 | T84-T82 | T64-66 | T84-T82 |
| condition | (area %) | (area %) | (area %) | (area %) |
| T0 | 3.3 | 2.9 | 3.5 | 2.8 |
| Freeze/Thaw | 1.0 | 1.4 | 1.1 | 1.5 |
| 1 w 37° C. | 3.0 | 1.8 | 3.3 | 2.1 |
| 6 w 37° C. | 10.0 | 4.0 | 9.8 | 4.2 |

[0686] According to Table 11 an increase in asparagine deamidation could be demonstrated by LC-MS peptide mapping at storage condition 37° C. After applying a freeze/thaw cycle both constructs were stable against deamidation.

[0687] Asparagine deamidation occurred in the following peptides:
[0688] T64-66: SRINDAFRLNDNSLEFLGIQPTLGESK
[0689] T84-T82: GFYPSDIAVEWESNGQPENNYK

[0690] Based on these results both constructs are shown to be prone to deamidation and monitoring this critical quality attribute by LC-MS peptide mapping has to be considered in the next formulation round (see example 3). Different conditions, e.g. pH, have to be evaluated for optimization against asparagine deamidation.

### Example 3

[0691] Example 1 comprised excipients and conditions to stabilize the two ACE2-IgG4 fusion constructs (v1261 and v1263) based on melting temperature and aggregation behaviour monitored by a Prometheus system.

[0692] Based on these results a new formulation comprising 1 mg/mL of the ACE2 IgG4 fusion construct in 10 mM acetic acid, 30 mM L-arginine hydrochloride, 250 mM Trehalose dihydrate, 5 mM L-methionine, 50 mM sodium chloride, 0.02% (w/v) polysorbate 20, pH 5.8 was produced.

[0693] Each of the two ACE2 fusion constructs (v1261 and v1263) was transferred during clone evaluation studies into this formulation and analyzed by DSF with regard to melting point and aggregation.

[0694] DSF was performed with an identical method setup as in example 1 using a temperature ramp with 1° C./min in a range starting from 20° C. to 95° C.

[0695] By using this formulation high melting points and very high aggregation onsets were obtained in all tested clones, which should finally lead to long term stability against aggregation.

[0696] For v1261 16 clones were evaluated. Tₒₙ was quantified in a range from 45.6° C. to 47.5° C., Tₘ from 54.8° C. to 56.1° C., T_{agg} from 63.7° C. to 67.8° C. with an T_{agg-IP} (aggregation inflection point) from 70.1° C. to 72.3° C.

[0697] For v1263 16 clones were evaluated. Tₒₙ was quantified in a range from 45.0° C. to 46.3° C., Tₘ from 50.4° C. to 54.5° C., T_{agg} from 64.7° C. to 68.2° C. with an T_{agg-IP} (aggregation inflection point) from 70.9° C. to 72.9° C.

### Example 4

[0698] In examples 1 and 3 formulations with high melting points and promising aggregation onsets to generate a stable formulation were identified.

[0699] Both constructs v1261 and v1263 were transferred into formulations according to Table 12 comprising a target concentration of 20 mg/mL of the tested ACE2-IgG4 fusion construct and evaluated during a stability study at different temperatures and stress conditions for best stabilizing effects regarding physico-chemical stability and potency.

TABLE 12
Pharmaceutical compositions tested for both constructs v1261 and v1263

| Formulation | Construct | Buffer | Surfactant | Stabilizer (sugar) | Further excipient |
|---|---|---|---|---|---|
| 1a | v1261 | 10 mM acetate, | 0.02% (w/v) | 263 mM sucrose | n.a. |
| | | pH 5.8 | polysorbate 20 | | |
| 2a | v1261 | 20 mM acetate, | 0.02% (w/v) | 106 mM trehalose | n.a. |
| | | pH 5.6 | polysorbate 20 | | |
| 3a | v1261 | 10 mM histidine, | 0.02% (w/v) | 145 mM sucrose | n.a. |
| | | pH 6.0 | polysorbate 20 | 40 mM NaCl | |
| 4a | v1261 | 10 mM acetate, | 0.02% (w/v) | 250 mM trehalose | 5 mM L-methionine |
| | | pH 5.8 | polysorbate 20 | 50 mM NaCl | 30 mM L-arginine |
| 5a | v1261 | 10 mM histidine, | 0.02% (w/v) | 220 mM trehalose | 30 mM L-arginine |
| | | 6.0 | polysorbate 20 | | |
| 6a | v1261 | 10 mM histidine, | 0.02% (w/v) | 250 mM trehalose | 5 mM L-methionine |
| | | pH 6.0 | polysorbate 20 | | |
| 1b | v1263 | 10 mM acetate, | 0.02% (w/v) | 263 mM sucrose | n.a. |
| | | pH 5.8 | polysorbate 20 | | |
| 2b | v1263 | 20 mM acetate, | 0.02% (w/v) | 106 mM trehalose | n.a. |
| | | pH 5.6 | polysorbate 20 | | |
| 3b | v1263 | 10 mM histidine, | 0.02% (w/V) | 145 mM sucrose | n.a. |
| | | pH 6.0 | polysorbate 20 | 40 mM NaCl | |
| 4b | v1263 | 10 mM acetate, | 0.02% (w/v) | 250 mM trehalose | 5 mM L-methionine |
| | | pH 5.8 | polysorbate 20 | 50 mM NaCl | 30 mM L-arginine |
| 5b | v1263 | 10 mM histidine, | 0.02% (w/v) | 220 mM trehalose | 30 mM L-arginine |
| | | 6.0 | polysorbate 20 | | |
| 6b | v1263 | 10 mM histidine, | 0.02% (w/v) | 250 mM trehalose | 5 mM L-methionine |
| | | pH 6.0 | polysorbate 20 | | |

[0700] Stability was evaluated at several temperature conditions (5° C., 25° C./60% RH and 40° C./75° C. RH) for following time periods:
[0701] 5° C. and 25° C./60% RH: up to 6 months
[0702] 40° C./75% RH: up to 3 months

[0703] In another set of experiments, the samples were subjected to 3 and 5 freeze/thaw cycles.

[0704] The constructs at a concentration of about 20 mg/mL in the above formulations were filled into polypropylene vials and stored at 5° C. for up to 3 months (only v1261) and 25° C. for 1 month to identify degradation pathways and evaluate possible formulation strategies to optimize stability of the ACE2-IgG4-FC constructs against those molecule modifications. Additionally, both constructs (v1261 and v1263) were stressed by freeze/thaw cycles to evaluate the influence of this processing step on protein stability.

[0705] After storage or stress treatment the samples were analyzed by size exclusion chromatography (SE-HPLC) for the presence of high molecular weight species (HMWS) and by non-reducing sodium dodecyl sulfate capillary electrophoresis (CE-SDS) for the presence of fragments (LMWS) and HMWS. Peptide mapping was used to quantify modifications by oxidation, deamidation and glycation. By anionic exchange chromatography the presence of acidic and basic species was monitored.

[0706] Construct v1261

[0707] Concentrations measured by OD280 nm showed stable results within method variability in all tested formulations under all storage conditions (data not shown).

TABLE 13
Percentage of HMWS determined by SE-HPLC after storage at 5°
C. or 25° C. and after freeze/thaw for construct v1261

| | | % HMWS | | | |
|---|---|---|---|---|---|
| | | | Freeze/ | 1 month | 3 months |
| Formulation | composition | T0 | Thaw | 25° C. | 5° C. |
| 1a | 10 mM acetate, | 12.4 | 12.2 | 31.7 | 17.4 |
| | 263 mM sucrose, | | | | |
| | 0.02% (w/v) | | | | |
| | polysorbate 20, | | | | |
| | pH 5.8 | | | | |
| 3a | 10 mM histidine, | 10.2 | 10.4 | 38.6 | 11.2 |
| | 145 mM sucrose, | | | | |
| | 40 mM NaCl, | | | | |
| | 0.02% (w/v) | | | | |
| | polysorbate 20, | | | | |
| | pH 6.0 | | | | |
| 4a | 10 acetate, 250 | 10.6 | 10.8 | 14.4 | 11.6 |
| | mM trehalose, 50 | | | | |
| | mM NaCl, 5 mM | | | | |
| | L-methionine, 30 | | | | |
| | mM L-arginine, | | | | |
| | 0.02% (w/v) | | | | |
| | polysorbate 20, | | | | |
| | pH 5.8 | | | | |

[0708] Formulation 4a showed excellent stability with regard to the formation of HMWS after storage, as only a slight increase was determined compared to the starting material.

[0709] Percentage of each of LMWS and HMWS was determined by CE-SDS after storage at 5° C. or 25° C. and after freeze/thaw for construct v1261.

[0710] The results indicated that all formulations were stable against fragmentation (% LMWS) after 1 month at 25° C. and 3 months at 5° C. All formulations also showed low % HMWS after 3 months at 5° C. again indicating good stability.

[0711] Furthermore, % HMWS after 1 month at 25° C. was at lower level in formulation 4a as compared to other formulations. In particular, formulation 4a showed excellent stability regarding the generation of HMWS after storage, as only a slight increase in HMWS was determined compared to the starting material.

TABLE 15
Sum of all oxidation values and sum of all deamidation values determined
by MS/MS peptide mapping after storage at 5° C. or 25° C. and after freeze/thaw for
construct v1261

| | | | | | | % deamidation (sum of all | | | |
|---|---|---|---|---|---|---|---|---|---|
| | | % oxidation (sum of all values) | | | | values) | | | |
| | | | | 1 | 3 | | | 1 | 3 |
| | | | | month | months | | | month | months |
| Formulation | composition | T0 | F/T | 25° C. | 5° C. | T0 | F/T | 25° C. | 5° C. |
| 1a | 10 mM | 21.8 | 24.4 | 88.0 | 27.8 | 20.4 | 20.3 | 21.4 | 23.7 |
| | acetate, 263 | | | | | | | | |
| | mM sucrose, | | | | | | | | |
| | 0.02% (w/V) | | | | | | | | |
| | polysorbate 20, | | | | | | | | |
| | pH 5.8 | | | | | | | | |
| 3a | 10 mM | 20.5 | 24.9 | 438.7 | 49.5 | 20.7 | 19.9 | 21.7 | 24.3 |
| | histidine, 145 | | | | | | | | |
| | mM sucrose, | | | | | | | | |
| | 40 mM NaCl, | | | | | | | | |
| | 0.02% (w/V) | | | | | | | | |
| | polysorbate 20, | | | | | | | | |
| | pH 6.0 | | | | | | | | |
| 4a | 10 mM | 20.3 | 19.8 | 23.2 | 17.2 | 19.9 | 18.8 | 21.3 | 23.7 |
| | acetate, 250 | | | | | | | | |
| | mM trehalose, | | | | | | | | |
| | 50 mM NaCl, 5 | | | | | | | | |
| | mM L- | | | | | | | | |
| | methionine, 30 | | | | | | | | |
| | mM L-arginine, | | | | | | | | |
| | 0.02% (w/V) | | | | | | | | |
| | polysorbate 20, | | | | | | | | |
| | pH 5.8 | | | | | | | | |

[0712] For formulation 4a no increase in oxidation exceeding method variability was quantified in all tested storage conditions. Deamidation values were constant within method variability in all tested formulations.

[0713] Glycation was determined as stable with very low contents (0.6% to 0.7%) during the complete storage periods (data not shown).

[0714] With a lysine as well as a methionine amino acid residue of the ACE2 protein being in close proximity to the interacting and bound S-Protein, formulations comprising trehalose as well as methionine are considered to maintain a high potency of the fusion protein during long term storage with regard to possible lysine glycation and methionine oxidation of protein amino acids.

TABLE 16
Percentage of acidic, main peak and basic species determined by Anion
Exchange Chromatography after storage at 5° C. or 25° C. and after freeze/thaw for
construct v1261

| | | | | | | | Formulation 4a | | |
|---|---|---|---|---|---|---|---|---|---|
| | | | | Formulation 3a | | | 10 mM acetate, 250 mM | | |
| | Formulation 1a | | | 10 mM histidine, 145 mM | | | trehalose, 50 mM NaCl, 5 | | |
| | 10 mM acetate, 263 mM | | | sucrose, 40 mM NaCl, | | | mM L-methionine, 30 mM | | |
| | sucrose, 0.02% (w/v) | | | 0.02% (w/v) polysorbate | | | L-arginine, 0.02% (w/v) | | |
| | polysorbate 20, pH 5.8 | | | 20, pH 6.0 | | | polysorbate 20, pH 5.8 | | |
| | % | % | % | % | % | % | % | % | % |
| Time | acidic | main | basic | acidic | main | basic | acidic | main | basic |
| point | species | peak | species | species | peak | species | species | peak | species |
| T0 | 42.2 | 57.2 | 0.6 | 46.0 | 53.5 | 0.5 | 40.6 | 58.9 | 0.5 |
| Freeze/ | 41.8 | 57.8 | 0.5 | 44.9 | 54.8 | 0.4 | 43.6 | 55.8 | 0.6 |
| Thaw | | | | | | | | | |
| 1 | 55.4 | 43.6 | 1.1 | 83.2 | 15.7 | 1.2 | 44.4 | 54.6 | 1.0 |
| month | | | | | | | | | |
| 25° C. | | | | | | | | | |
| 3 | 48.4 | 51.1 | 0.5 | 54.1 | 45.5 | 0.4 | 46.6 | 53.1 | 0.3 |
| months | | | | | | | | | |
| 5° C. | | | | | | | | | |

[0715] Formulation 4a led to the best stabilizing effect, as just a very slight increase in acidic species was quantified after storage, even at accelerated storage conditions of 25° C. In formulation 4a the basic species showed a comparable slight increase after 1 month storage at 2500 and the content of basic species was determined as stable after 3 months storage at 5° C.

[0716] In summary, formulation 4a led to an overall stabilization of construct v1261 regarding physico-chemical stability.

[0717] Construct v1263

[0718] Concentrations measured by OC280 nm showed stable results within method variability during all storage conditions in all tested formulations (data not shown).

TABLE 17
Percentage of HMWS determined by SE-HPLC after storage
at 25° C. and after freeze/thaw for construct v1263

| | | % HMWS | | | |
|---|---|---|---|---|---|
| | | | Freeze/ | 2 weeks | 1 month |
| Formulation | composition | T0 | Thaw | 25° C. | 25° C. |
| 1b | 10 mM acetate, | 6.9 | 6.8 | 8.5 | 8.8 |
| | 263 mM sucrose, | | | | |
| | 0.02% (w/v) | | | | |
| | polysorbate 20, pH | | | | |
| | 5.8 | | | | |
| 2b | 20 mM acetate, | 7.5 | 7.6 | 9.4 | 10.0 |
| | 106 mM trehalose, | | | | |
| | 0.02% (w/v) | | | | |
| | polysorbate 20, pH | | | | |
| | 5.6 | | | | |
| 3b | 10 mM histidine, | 6.1 | 6.3 | 7.6 | 7.7 |
| | 145 mM sucrose, | | | | |
| | 40 mM NaCl, 0.02 | | | | |
| | % (w/v) polysorbate | | | | |
| | 20, pH 6.0 | | | | |
| 4b | 10 mM acetate, | 6.4 | 6.5 | 7.6 | 6.8 |
| | 250 mM trehalose, | | | | |
| | 50 mM NaCl, 5 mM | | | | |
| | L-methionine, 30 | | | | |
| | mM L-arginine, | | | | |
| | 0.02% (w/v) | | | | |
| | polysorbate 20, pH | | | | |
| | 5.8 | | | | |
| 5b | 10 mM histidine, | 6.4 | 6.3 | 7.8 | 7.9 |
| | 220 mM trehalose. | | | | |
| | 30 mM L-arginine, | | | | |
| | 0.02% (w/v) | | | | |
| | polysorbate 20, pH | | | | |
| | 6.0 | | | | |
| 6b | 10 mM histidine, | 6.7 | 6.6 | 8.1 | 8.3 |
| | 250 mM trehalose, | | | | |
| | 5 mM L- | | | | |
| | methionine, 0.02% | | | | |
| | (w/v) polysorbate | | | | |
| | 20, pH 6.0 | | | | |

[0719] All formulations showed a very good stability regarding the generation of HMWS at all tested storage conditions. Formulations 1b and 2b seem to generate slightly higher contents of HMWS.

[0720] Percentage of each of LMWS was determined by CE-SOS after storage at 25° C. and for construct v1263.

[0721] All formulations comprised a very good stability regarding the formation of LMWS after the tested storage conditions

TABLE 19
Sum of all oxidation values and sum of all deamidation values determined by MS/MS
peptide mapping after storage at 25° C. and after freeze/thaw for construct v1263

| | | % oxidation (sum of all values) | | | | % deamidation (sum of all values) | | | |
|---|---|---|---|---|---|---|---|---|---|
| | | | | 2 | 1 | | | | 1 |
| | | | | weeks | month | | | 2 weeks | month |
| Formulation | composition | T0 | F/T | 25° C. | 25° C. | T0 | F/T | 25° C. | 25° C. |
| 1b | 10 mM acetate, 263 mM | 8.2 | 7.6 | 8.4 | 9.2 | 19.9 | 18.3 | 22.5 | 21.0 |
| | sucrose, 0.02% (w/v) | | | | | | | | |
| | polysorbate 20, pH 5.8 | | | | | | | | |
| 2b | 20 mM acetate, 106 mM | 8.3 | 7.6 | n.a. | 9.3 | 18.2 | 18.6 | 22.9 | 21.3 |
| | trehalose, 0.02 % (w/v) | | | | | | | | |
| | polysorbate 20, pH 5.6 | | | | | | | | |
| 3b | 10 mM histidine, 145 mM | 7.5 | 7.0 | 8.2 | 9.1 | 20.0 | 17.6 | 20.5 | 20.7 |
| | sucrose, 40 mM NaCl, 0.02% (w/v) | | | | | | | | |
| | polysorbate 20, H 6.0 | | | | | | | | |
| 4b | 10 acetate, 250 mM | 7.9 | 7.1 | 7.7 | 8.2 | 19.3 | 17.5 | 20.7 | 19.7 |
| | trehalose, 50 mM | | | | | | | | |
| | NaCl, 5 mM L-methionine, | | | | | | | | |
| | 30 mM L-arginine, 0.02% (w/v) | | | | | | | | |
| | polysorbate 20, pH 5.8 | | | | | | | | |
| 5b | 10 mM histidine, 220 | 8.4 | 6.9 | 8.5 | 8.3 | 18.4 | 18.4 | 21.2 | 19.9 |
| | trehalose. 30 mM | | | | | | | | |
| | L-arginine, 0.02% (w/v) | | | | | | | | |
| | polysorbate 20, pH 6.0 | | | | | | | | |
| 6b | 10 mM histidine, 250 mM | 7.8 | 6.7 | 7.8 | 7.7 | 18.6 | 19.2 | 20.4 | 20.7 |
| | trehalose, 5 mM | | | | | | | | |
| | L-methionine, 0.02% (w/v) | | | | | | | | |
| | polysorbate 20, pH 6.0 | | | | | | | | |

[0722] All tested formulations showed excellent stability regarding oxidation and deamidation. After storage at accelerated storage conditions all values were comparable to the starting material and were within method variability.

[0723] Also glycation was determined as stable with very low contents (0.6% to 0.7%) during the complete storage periods (data not shown).

TABLE 20
Percentage of acidic, main peak and basic species determined by Anion
Exchange Chromatography after storage at 25° C. and after freeze/thaw for construct
v1263

| | Formulation 1b | | | Formulation 2b | | | Formulation 3b | | |
|---|---|---|---|---|---|---|---|---|---|
| | 10 mM acetate, 263 mM | | | 20 mM acetate, 106 mM | | | 10 mM histidine, 145 mM | | |
| | sucrose, 0.02% (w/V) | | | trehalose, 0.02% (w/V) | | | sucrose, 40 mM NaCl, 0.02% | | |
| | polysorbate 20, pH 5.8 | | | polysorbate 20, pH 5.6 | | | (w/v) polysorbate 20, pH 6.0 | | |
| | % | % | % | % | % | % | % | % | % |
| Time | acidic | main | basic | acidic | main | basic | acidic | main | basic |
| point | species | peak | species | species | peak | species | species | peak | species |
| T0 | 35.5 | 63.8 | 0.7 | 35.0 | 64.4 | 0.7 | 35.0 | 64.5 | 0.5 |
| Freeze/ | 34.8 | 64.5 | 0.7 | 34.8 | 64.6 | 0.6 | 34.4 | 65.0 | 0.7 |
| Thaw | | | | | | | | | |
| 2 weeks | 33.4 | 66.0 | 0.6 | 33.8 | 65.4 | 0.8 | 33.7 | 65.7 | 0.6 |
| 25° C. | | | | | | | | | |
| 1 | 33.5 | 65.5 | 1.0 | 34.3 | 64.6 | 1.1 | 34.6 | 64.5 | 0.9 |
| months | | | | | | | | | |
| 25° C. | | | | | | | | | |
| | Formulation 4b | | | | | | | | |
| | 10 acetate, 250 mM | | | Formulation 5b | | | Formulation 6b | | |
| | trehalose, 50 mM NaCl, 5 | | | 10 mM histidine, 220 mM | | | 10 mM histidine, 250 mM | | |
| | mM L-methionine, 30 mM | | | trehalose. 30 mM L- | | | trehalose, 5 mM L- | | |
| | L-arginine, 0.02% (w/V) | | | arginine, 0.02% (w/V) | | | methionine, 0.02% (w/V) | | |
| | polysorbate 20, pH 5.8 | | | polysorbate 20, pH 6.0 | | | polysorbate 20, pH 6.0 | | |
| | % | % | % | % | % | % | % | % | % |
| Time | acidic | main | basic | acidic | main | basic | acidic | main | basic |
| point | species | peak | species | species | peak | species | species | peak | species |
| T0 | 35.4 | 63.6 | 1.0 | 35.1 | 64.2 | 0.6 | 34.9 | 64.4 | 0.7 |
| Freeze/ | 34.8 | 64.1 | 1.0 | 34.6 | 64.8 | 0.6 | 34.1 | 65.1 | 0.7 |
| Thaw | | | | | | | | | |
| 2 weeks | 34.5 | 64.7 | 0.8 | 34.2 | 65.2 | 0.6 | 33.7 | 65.8 | 0.6 |
| 25° C. | | | | | | | | | |
| 1 | 32.6 | 66.1 | 1.3 | 35.0 | 64.3 | 0.7 | 33.4 | 65.8 | 0.8 |
| months | | | | | | | | | |
| 25° C. | | | | | | | | | |

[0724] All tested formulations showed a very good stability with regard to the generation of both acidic and basic species.

[0725] For construct v1263 all tested formulations are excellent formulation candidates and show excellent stability also at accelerated storage conditions, indicating a promising long-term storage stability at 2° C. to 8° C. for this molecule.

### Example 5

[0726] In example 1 excipients and conditions to stabilize two ACE2 IgG4 Fc fusion constructs (v1261 and v1263) were identified based on melting temperature and aggregation behavior. In example 2 quality attributes were identified and a suitable method set to monitor protein modifications was developed. Also the need for formulation optimization could be demonstrated. A non-optimized formulation would lead to generation of HMWS, fragmentation and an increase of deamidation, oxidation and probably glycation.

[0727] In example 3 a new formulation with high melting points and promising aggregation onsets was identified to generate a stable formulation.

[0728] Based on these results, pharmaceutical compositions according to Table 13 were selected for further analysis.

[0729] For buffering the solutions histidine-, phosphate-, acetate- and succinate buffer systems were evaluated. Formulations comprising different pH values were analyzed for identification of a pH optimum.

[0730] As surfactants polysorbate 20, polysorbate 80 and poloxamer 188 were evaluated, also a formulation without surfactant was tested.

[0731] Trehalose and sucrose were evaluated for stabilizing the formulation, also a completely sugar-free salt-based formulation (with sodium chloride) and in addition a formulation comprising both sugar and salt was analyzed.

[0732] In addition, the influence of excipients L-arginine and L-methionine on further product stabilization was evaluated.

TABLE 21
Pharmaceutical compositions tested for both constructs v1261 and v1263

| | | | | Further |
|---|---|---|---|---|
| Formulation | Buffer | Surfactant | Stabilizer (sugar) | excipient |
| 1 | 10 mM histidine, | 0.02% (w/v) | 250 mM trehalose | n.a. |
| | pH 6.0 | polysorbate 20 | | |
| 2 | 10 mM histidine, | 0.02% (w/v) | 250 mM trehalose | n.a. |
| | pH 5.7 | polysorbate 20 | | |
| 3 | 10 mM histidine, | 0.02% (w/v) | 250 mM trehalose | n.a. |
| | pH 6.3 | polysorbate 20 | | |
| 4 | 10 mM phosphate, | 0.02% (w/v) | 250 mM trehalose | n.a. |
| | pH 6.0 | polysorbate 20 | | |
| 5 | 10 mM acetate, | 0.02% (w/v) | 250 mM trehalose | n.a. |
| | pH 5.7 | polysorbate 20 | | |
| 6 | 10 mM succinate, | 0.02% (w/v) | 250 mM trehalose | n.a. |
| | pH 6.3 | polysorbate 20 | | |
| 7 | 10 mM histidine, | 0.02% (w/v) | 250 mM sucrose | n.a. |
| | pH 6.0 | polysorbate 20 | | |
| 8 | 10 mM histidine, | 0.02% (w/v) | 250 mM trehalose | n.a. |
| | pH 6.0 | polysorbate 80 | | |
| 9 | 10 mM histidine, | 0.02% (w/v) | 220 mM trehalose | 30 mM L- |
| | pH 6.0 | polysorbate 20 | | Arginine |
| 10 | 10 mM histidine, | 0.02% (w/v) | 250 mM trehalose | 5 mM L- |
| | pH 6.0 | polysorbate 20 | | Methionine |
| 11 | 10 mM histidine, | 0.02% (w/v) | 145 mM trehalose | 40 mM NaCl |
| | pH 6.0 | polysorbate 20 | | |
| 12 | 10 mM histidine, | 0.02% (w/v) | n.a | 135 mM NaCl |
| | pH 6.0 | polysorbate 20 | | |
| 13 | 10 mM histidine, | n.a. | 250 mM Trehalose | n.a. |
| | pH 6.0 | | | |
| 14 | 10 mM histidine, | 0.02% (w/v) | 250 mM Trehalose | n.a. |
| | pH 6.0 | poloxamer 188 | | |

[0733] All pharmaceutical compositions listed above were prepared by dialysis.

[0734] Stability was evaluated at several temperature conditions (5° C., 25° C./60% RH and 40° C./75% RH) for following time periods:
[0735] 5° C.: up to 12 months
[0736] 25° C./60% RH: up to 6 months
[0737] 40° C./75% RH: up to 3 months

[0738] In another set of experiments, the samples were subjected to 3 and 5 freeze/thaw cycles.

[0739] The following analytical panel was used to analyze protein stability:

[0740] UV280 (concentration of ACE2-IgG4-FC fusion constructs), SE-HPLC (aggregation), CE-SDS non-reduced (LMWS, HMWS), peptide mapping (deamidation, oxidation, glycation), nanoDSF (melting temperature and aggregation), cIEF (basic and acidic species), AEX (basic and acidic species), a binding ELISA for quantification of activity and an assay for quantification of enzymatic activity.

### Example 6: Formulation Screening for ACE2(18-732)-IgG1, v1260

[0741] Melting points Tₘ and unfolding onset temperatures were calculated by Software PR-ThermControl-CFR from Nanotemper. Each sample was analyzed in a single measurement. Analyzing the samples of v1260 with the Prometheus system produced the following results (see Table 22, ten best performing formulations for each parameter were ranked from (1)-(10) and are additionally shown in bold letters).

TABLE 22
Stability assessment of v1260 by DSF measurements

| Formulation number | T_{m, onset} [° C.] | Tₘ [° C.] | T_{agg-on} [° C.] |
|---|---|---|---|
| A4 | 50.8 (3) | 56.5 (3) | 71.7 (4) |
| A5 | 45.9 | 52.5 | 52.4 |
| A7 | 51.4 (2) | 58.7 (1) | 62.6 (9) |
| A8 | 46.8 | 52.3 | 53.8 |
| A10 | 46.9 | 53.1 | n.a.**) |
| B7 | 47.7 | 53.8 | 58.2 (10) |
| B8 | 45.7 | 53.4 | n.a.**) |
| B11 | 47.3 | 53.6 | 54.3 |
| C1 | 48.2 (7) | 54.0 | 79.4 (1) |
| C4 | 48.2 (8) | 54.7 (7) | 66.7 (6) |
| C11 | 48.0 (10) | 54.9 (6) | 58.2 (10) |
| C12 | 48.4 (5) | 54.7 (8) | 67.5 (5) |
| D4 | 46.3 | 52.8 | 54.9 |
| D10 | 47.6 | 54.5 (10) | 55.8 |
| D11 | 50.1 (4) | 56.4 (4) | 57.1 |
| D12 | 46.2 | 53.9 | n.a.**) |
| F5 | 48.0 (10) | 54.7 (9) | 57.6 |
| F8 | 47.1 | 53.5 | 54.7 |
| G8 | 47.5 | 53.9 | 56.3 |
| G10 | 47.4 | 53.8 | 53.3 |
| H1 | 44.1 | 51.4 | 51.8 |
| H3 | 48.1 (9) | 53.9 | 72.8 (3) |
| H4 | 47.5 | 54.5 (10) | 65.9 (7) |
| H7 | 48.3 (6) | 54.9 (5) | 64.0 (8) |
| H11 | 51.5 (1) | 57.5 (2) | 72.9 (2) |

(1) to- (10) best ten results within criteria; if several formulations are on tenth position all of them were included in the rating
**)no results, as no scattering readout possible

[0742] The stability of IgG1 (v1260) (see Table 22) and IgG4 (v1261) (see Table 3) ACE2-Fc fusion constructs is comparable without significant difference. The catalytically inactive construct (v1263) bearing two mutations shows a lower melting temperature (see Table 5).

[0743] The use of sorbitol (e.g. Formulation A5, B8), mannitol (H3), glycine (H3) and proline (D10) did not improve stability evaluated by nanoDSF.

[0744] Surprisingly, formulation C1 containing L-Arginine (see Table 22) as excipient in addition to sucrose and sodium chloride led also to high T_{agg-on}, showing promising stability against aggregation compared to other tested formulations, even though this formulation does not contain any surfactant.

[0745] Surfactants polysorbate 20 and polysorbate 80 worked comparably in the screening in the tested ranges, both were superior compared to Poloxamer 188 and PEG-3350. Also formulations without any surfactant led to a stable formulation (C1).

[0746] The optimum pH of the solution was determined to be in a range between 5.6 and 6.3. Identified suitable buffer systems for this pH range based on results from Table 22 are: Acetic acid/sodium acetate (see formulation A4, DP), Histidine/Histidine HCl (see formulations C4, C11 and C12), sodium phosphate monobasic/sodium phosphate dibasic (see formulation A7) and Succinic acid/Disodium succinate (see formulation H11).

[0747] Within the 25 tested formulations for v1260, formulations H1l, A7, A4, D11 and C12 (see Table 23) showed highest melting temperatures which is preferred for developing long term stable formulations of the v1260 construct. Surprisingly, these formulations can comprise either a sugar as stabilizer or can be based on a sugar-free sodium chloride formulation (H11). That means, solutions containing a sugar like trehalose and sucrose as stabilizer show a melting behavior comparable to sugar free formulations containing sodium chloride as tonicity agent.

TABLE 23
Best five formulation candidates based on melting temperatures (v1260)

| Formulation | Tonicity agent/stabilizer | Buffering system | Surfactant | pH |
|---|---|---|---|---|
| H11 | 100 mM NaCl | 39.6 mM Succinic acid/ | 0.03% (w/v) | pH 6.2 |
| | | Disodium succinate | PS 80 | |
| A7 | 159 mM Trehalose | 42 mM Sodium | 0.04% (w/v) | pH 6.0 |
| | | phosphate monobasic | PS 20 | |
| | | dihydrate | | |
| | | 8.5 mM Sodium | | |
| | | phosphate dibasic | | |
| | | anhydros | | |
| A4 | 263 mM Sucrose | 10 mM Glacial acetic acid | 0.1% (w/v) | pH 5.8 |
| | | | PS 80 | |
| D11 | 106 mM Trehalose | 4.2 mM Glacial acetic | 0.02% (w/v) | pH 5.6 |
| | | acid | PS 20 | |
| | | 15.7 mM Sodium acetate | | |
| C12 | 275 mM Trehalose | 25.8 mM L-Histidine | 0.02% (w/v) | pH 6.3 |
| | | | PS 80 | |

### Example 7: Short-Term Stability of ACE2(18-732)-IgG1 (v1260, SEQ ID NO 7), Normal Sialylation (NS)/ACE2(18-732)-IgG1 (v1260, SEQ ID NO 7), High Sialylation (HS)/ACE2(18-732)-IgG1 (YTE) (v1328, SEQ ID NO 27), High Sialylation

[0748] In order to show suitability of the formulation 4a also with regard to other ACE2-Fc fusion proteins, results for ACE2(18-732)-IgG1 (v1260) with normal sialylation (Table 24), ACE2(18-732)-IgG1 (v1260) highly sialylated (HS) (Table 25) and ACE2(18-732)-IgG1(YTE) (v1328) highly sialylated (Table 26) are shown after protein purification and exchange into formulation 4a.

[0749] The following analytical panel was used to analyze protein stability:

[0750] SoloVPE (quantification of the concentration of ACE2-Fc fusion constructs), SE-HPLC (aggregation), CE-SDS non-reduced (LMWS), nanoDSF (melting temperature and aggregation), AEX (basic and acidic species), and binding ELISA (quantification of potency with regard to binding to the target)

TABLE 24
Analytical results of ACE2(18-732)-IgG1 normal sialylation (v1260)
after protein purification and exchange into formulation 4a.
SoloVPE (content)

| Timepoint and condition | Concentration [mg/mL] |
|---|---|
| T0 | 23.7 |

SE-HPLC (aggregation)

| | HMWS | Main | LMWS |
|---|---|---|---|
| Timepoint and condition | [area %] | [area %] | [area %] |
| T0 | 2.2 | 97.8 | N.D.* |

CE-SDS non-reduced (LMWS)

| Timepoint and condition | LMWS [area %] | Main [area %] |
|---|---|---|
| T0 | 2.2 | 97.7 |

*not detected

TABLE 25
Analytical results of ACE2(18-732)-IgG1 highly sialylated (v1260)
after protein purification and exchange into formulation 4a.
SoloVPE (content)

| Timepoint and condition | Concentration [mg/mL] |
|---|---|
| T0 | 24.3 |

SE-HPLC (aggregation)

| | HMWS | Main | LMWS |
|---|---|---|---|
| Timepoint and condition | [area %] | [area %] | [area %] |
| T0 | 3.8 | 96.2 | N.D.* |

CE-SDS non-reduced (LMWS)

| Timepoint and condition | LMWS [area %] | Main [area %] |
|---|---|---|
| T0 | 1.5 | 98.5 |

AEX (basic and acidic species)

| | Acidic | Main | Basic |
|---|---|---|---|
| Timepoint and condition | [area %] | [area %] | [area %] |
| T0 | 34.2 | 65.5 | 0.3 |

NanoDSF (melting temperature and aggregation)

| Timepoint and condition | T_{m, onset} [° C.] | Tₘ [° C.] | T_{agg-on} [° C.] |
|---|---|---|---|
| T0 | 48.66 | 56.67 | 61.19 |

Binding ELISA** (quantification of potency
with regard to binding to the target)

| Timepoint and condition | EC50 [μg/mL] |
|---|---|
| T0 | 8.6 |

*not detected
**for bindingELISA a different detection antibody was used in order to detect IgG1 fusion proteins

TABLE 26
Analytical results of ACE2(18-732)-IgG1(YTE) HS (v1328) after
protein purification and exchange into formulation 4a.
SoloVPE (content)

| Timepoint and condition | Concentration [mg/mL] |
|---|---|
| T0 | 26.8 |

SE-HPLC (aggregation)

| | HMWS | Main | LMWS |
|---|---|---|---|
| Timepoint and condition | [area %] | [area %] | [area %] |
| T0 | 4.2 | 95.8 | N.D.* |

CE-SDS non-reduced (LMWS)

| Timepoint and condition | LMWS [area %] | Main [area %] |
|---|---|---|
| T0 | 1.7 | 98.3 |

AEX (basic and acidic species)

| | Acidic | Main | Basic |
|---|---|---|---|
| Timepoint and condition | [area %] | [area %] | [area %] |
| T0 | 35.4 | 64.0 | 0.6 |

NanoDSF (melting temperature and aggregation)

| Timepoint and condition | T_{m, onset} [° C.] | Tₘ [° C.] | T_{agg-on} [° C.] |
|---|---|---|---|
| T0 | 48.59 | 56.82 | 58.71 |

Binding ELISA** (quantification of potency
with regard to binding to the target)

| Timepoint and condition | EC50 [μg/mL] |
|---|---|
| T0 | 10.5 |

*not detected
**for binding ELISA a different detection antibody was used in order to detect IgG1 fusion proteins

[0751] The fusion proteins v1260 (ACE2 (18-732)-IgG1 normal sialylated as well as highly sialylated and v1328 (ACE2 (18-732)-IgG1 (YTE) highly sialylated were analyzed after protein purification and buffer exchange into formulation 4a with respect to aggregates, fragments, basic and acidic species, melting temperature and target binding. The results for these fusion proteins (Table 24, 25 and 26). were comparable to the results obtained with the IgG4 versions of the molecule. This confirms the applicability of formulation 4a for different ACE2-Fc constructs.

### Example 8: Stability Study of ACE2(18-732)-IgG4, Normal Sialylation (for 8 Months at 5° C.) and Highly Sialylated (Upon Freeze/Thaw (F/T) and for 3 Months at 5° C. or 26° C.)

[0752] Both a normal sialylated and a highly sialylated form of the fusion protein were investigated. The normal sialylated form was produced under standard culturing conditions (CHO cells were cultured in in FortiCHO medium (Thermo Fisher Scientific) supplemented with 4 mM L-glutamine, anti-clumping agent (Gibco; diluted 1:1000) and 5 μM zinc chloride. Flat feed of 2% CellBoost 7a medium and 0.2% CellBoost 7b per day from day 3 to 14 was added. Glucose was added up to 4 g L⁻¹ from day 3 on from a glucose solution),

[0753] In contrast, the highly sialylated form was produced by culturing CHO cells in in FortiCHO medium (Thermo Fisher Scientific) supplemented with 4 mM L-glutamine, anti-clumping agent (Gibco; diluted 1:1000), 5 μM zinc chloride, 40 μM manganese chloride and 10 mM N-acetylmannosamine for two days at 37° C. Starting on day 3 of the culture until day 14, the cells were fed daily with CellBoost 7a medium (Thermo Fisher Scientific) containing 40 μM manganese chloride and 0.185 mM galactose and Cell Boost 7b medium (Thermo Fisher Scientific and maintained at a temperature of 37° C. Glucose was added up to 4 g L⁻¹ from day 3 on from a glucose solution.

[0754] A formulation comprising a target concentration of 40 mg/mL of the ACE2 IgG4 fusion construct (v1261) in 10 mM acetic acid, 30 mM L-arginine hydrochloride, 250 mM Trehalose dihydrate, 5 mM L-methionine, 50 mM sodium chloride, 0.02% (w/v) polysorbate 20, pH 5.8 was produced and 250 μL of the solution were filled into 2R vials.

[0755] The purified protein solution was stored at different temperatures and stress conditions or underwent three freeze thaw cycles within a stability study before evaluating physico-chemical quality parameters of the ACE2-IgG as well its potency using different analytical techniques. Stability was evaluated for the following conditions:
[0756] 5° C. and 26° C.: up to 3 months for ACE2(18-732)-IgG4 highly sialylated
[0757] Freeze/thaw: three cycles at −80° C. and room temperature for ACE2(18-732)-IgG4 highly sialylated
[0758] 5° C.: up to 8 months for ACE2(18-732)-IgG4 with normal sialylation

[0759] The following analytical panel was used to analyze protein stability:

[0760] Nanodrop (quantification of the concentration of ACE2-Fc fusion constructs), SE-HPLC (aggregation), CE-SDS non-reduced (LMWS), nanoDSF (melting temperature and aggregation), AEX (basic and acidic species) and binding ELISA (quantification of potency with regard to binding to the target).

[0761] The following results were observed and are summarized in table 27 and 28:

TABLE 27
Analytical results with regard to the stability of ACE2(18-732)-IgG4
highly sialylated (v1261) after storage at 5° C. and 26°
C. for up to three months as well as for three F/T cycles in formulation 4a
SoloVPE/Nanodrop (content)

| Timepoint and condition | Concentration [mg/mL] |
|---|---|
| T0 | 37.8 |
| F/T | 37.7 |
| 3 M 5° C. | 37.0 |
| 1 M 26° C. | 37.9 |
| 3 M 26° C. | 37.4 |

SE-HPLC (HMWS)

| Timepoint and condition | HMWS [area %] | Main [area %] |
|---|---|---|
| T0 | 3.2 | 96.8 |
| F/T | 3.2 | 96.8 |
| 3 M 5° C. | 3.1 | 96.9 |
| 1 M 26° C. | 3.0 | 96.6 |
| 3 M 26° C. | 3.0 | 96.2 |

CE-SDS non-reduced (LMWS)

| Timepoint and condition | LMWS [area %] | Main [area %] |
|---|---|---|
| T0 | 1.5 | 98.5 |
| F/T | 1.5 | 98.5 |
| 3 M 5° C. | 4.7 | 95.3 |
| 1 M 26° C. | 10.5 | 89.5 |
| 3 M 26° C. | 12.4 | 87.7 |

AEX (basic and acidic species)

| | Acidic | Main | Basic |
|---|---|---|---|
| Timepoint and condition | [area %] | [area %] | [area %] |
| T0 | 20.4 | 79.6 | 0.0 |
| F/T | 21.0 | 79.0 | 0.0 |
| 3 M 5° C. | 28.5 | 71.5 | 0.0 |
| 1 M 26° C. | 29.7 | 70.2 | 0.09 |
| 3 M 26° C. | N/A* | N/A* | N/A* |

| Timepoint and condition | T_{m, onset} [° C.] | Tₘ [° C.] | T_{agg-on} [° C.] |
|---|---|---|---|
| T0 | 48.97 | 57.23 | 69.26 |
| F/T | 49.51 | 57.25 | 68.68 |
| 3 M 5° C. | N/A* | N/A* | N/A* |
| 1 M 26° C. | 49.14 | 57.24 | 68.05 |
| 3 M 26° C. | 49.59 | 57.27 | 58.15 |

| Timepoint and condition | EC50 [μg/mL] |
|---|---|
| T0 | 18.8 |
| F/T | 21.1 |
| 3 M 5° C. | 22.8 |
| 1 M 26° C. | N/A* |
| 3 M 26° C. | 23.8 |

*no results applicable

[0762] The following trends were observed for ACE2(18-732)-IgG4 highly sialylated during storage and F/T. Sample concentration was stable within assay variability after storage for 3 months at 5° C. and 26° C. Also the aggregation level was not significantly influenced by storage for 3 months at 5° C. and 26° C., as the content of HMWS determined by SE-HPLC was stable for all tested conditions within assay variation.

[0763] The total LMW area % increased at both temperature conditions over time and no LMWS were formed during F/T cycles.

[0764] The percentage of acidic species increased overtime upon storage.

[0765] Unfolding after 3M at 26° C. was not significantly affected. However, after 3M at 26° C., the onset of aggregation temperature decreased.

[0766] The samples stored for three months at 500 or 2600 show a similar potency with regard to binding to the target as the samples at T0.

TABLE 28
Analytical results with regard to the stability of
ACE2(18-732)-IgG4 normal sialylated (v1261) after
storage at 5° C. for eight months (formulation 4a)
SoloVPE/NanoDrop (content)

| Timepoint and condition | Concentration [mg/mL] |
|---|---|
| T0 | 42.5 |
| 8 M 5° C. | 43.1 |

SE-HPLC (HMWS)

| Timepoint and condition | HMWS [area %] | Main [area %] |
|---|---|---|
| T0 | 4.2 | 95.8 |
| 8 M 5° C. | 3.9 | 96.1 |

CE-SDS non-reduced (LMWS)

| Timepoint and condition | LMWS [area %] | Main [area %] |
|---|---|---|
| T0 | 2.0 | 98.0 |
| 8 M 5° C. | 2.7 | 97.3 |

AEX (basic and acidic species)

| | Acidic | Main | Basic |
|---|---|---|---|
| Timepoint and condition | [area %] | [area %] | [area %] |
| T0 | 29.3 | 70.6 | 0.2 |
| 8 M 5° C. | 38.3 | 61.7 | 0.2 |

NanoDSF (melting temperature and aggregation)

| Timepoint and condition | T_{m, onset} [° C.] | Tₘ [° C.] | T_{agg-on} [° C.] |
|---|---|---|---|
| T0 | 45.84 | 56.16 | 56.83 |
| 8 M 5° C. | 46.43 | 56.22 | 59.02 |

Binding ELISA (quantification of potency
with regard to binding to the target)

| Timepoint and condition | EC50 [μg/mL] |
|---|---|
| T0 | 18.8 |
| 8 M 5° C. | 17.7 |

[0767] After storage for 8 months at 5° C. the following trends were observed for ACE2(18-732)-IgG4 normal_sialylated: both the sample concentration as well as the HMWS level remained constant within method variability.

[0768] The total LMWS area % increased only slightly over time. With regard to charged species, the percentage of acidic species slightly increased over time upon storage. Unfolding was not significantly affected and the onset of aggregation temperature increased slightly after 8 months at 5° C.

[0769] The samples stored for eight months at 5° C. showed a similar potency after long term storage when compared to T0.

[0770] The batch was further analysed by analytical ultracentrifugation (AUC) at T0 in order to compare initial levels of aggregate formation using two orthogonal methods. Aggregate formation was comparable when analyzed by SE-HPLC and AUC (data not shown).

### Example 9: Stability Study of ACE2(18-732)-IgG4, Normal Sialylation, (v1261, SEQ ID NO 6)

[0771] A formulation comprising a target concentration of 40 mg/mL of the ACE2-IgG4 fusion construct in formulation 4a (10 mM acetic acid, 30 mM L-arginine hydrochloride, 250 mM Trehalose dihydrate, 5 mM L-methionine, 50 mM sodium chloride, 0.02% (w/v) polysorbate 20, pH 5.8) was produced and 1 mL of the solution was filled into 2R vials.

[0772] The solution was stored at different temperatures and stress conditions or underwent three freeze thaw cycles within a stability study before evaluating physico-chemical quality parameters of the ACE2-IgG as well its potency and activity using different analytical techniques. Stability was evaluated for the following conditions:
[0773] F/T: 3 cycles at −76° C.±9° C. and RT
[0774] up to 6 months at −76° C.±9° C.
[0775] up to 6 months at 5° C.±3° C. and 25° C.±2° C./60% RH±5% RH as well as up to 3 months at 40° C.±2° C./75% RH±5% RH

[0776] The following analytical panel was used to analyze protein stability:

[0777] OD280 (quantification of the concentration of ACE2-Fc fusion constructs), SE-HPLC (aggregation), CE-SOS non-reduced (LMWS, HMWS), cIEF (basic and acidic species), binding ELISA (quantification of potency with regard to binding to the target), enzymatic activity of ACE2-IgG, visible particles, subvisible particles, pH, color, clarity, osmolality.

[0778] The following results were observed and are summarized in table 29:

TABLE 29
Analytical results with regard to the stability
of ACE2(18-732)-IgG4 normal sialylation (v1261)
OD280 (content)

| Timepoint and condition | Concentration [mg/mL] |
|---|---|
| T0 | 39.0/40.1* |
| F/T | 38.5 |
| 6 M −80° C. | 38.4 |
| 3 M 5° C. | 40.6/41.2* |
| 6 M 5° C. | 42.2/38.5* |
| 1 M 25° C. | 37.9 |
| 3 M 25° C. | 39.2 |
| 6 M 25° C. | 42.3 |
| 1 M 40° C. | 37.8 |
| 2 M 40° C. | 39.6 |
| 3 M 40° C. | 42.3 |

SE-HPLC (aggregation)

| | HMWS | Main | LMWS |
|---|---|---|---|
| Timepoint and condition | [area %] | [area %] | [area %] |
| T0 | 3.2/3.5* | 96.7/96.5* | 0.2/0.0* |
| F/T | 2.3 | 97.7 | 0.0 |
| 6 M −80° C. | 2.7 | 97.3 | 0.0 |
| 3 M 5° C. | 2.6/2.9* | 97.4/97.1* | 0.0/0.0* |
| 6 M 5° C. | 3.0/3.1* | 97.0/96.9* | 0.0/0.0* |
| 1 M 25° C. | 3.5 | 95.7 | 0.8 |
| 3 M 25° C. | 3.5 | 93.4 | 3.1 |
| 6 M 25° C. | 4.4 | 92.7 | 2.9 |
| 1 M 40° C. | 10.9 | 88.2 | 0.9 |
| 2 M 40° C. | 13.3 | 85.6 | 1.1 |
| 3 M 40° C. | 9.0 | 89.6 | 1.4 |

| Timepoint and condition | LMWS [area %] | Main [area %] |
|---|---|---|
| T0 | 0.0/0.0* | 100.0/100.0* |
| F/T | 0.0 | 100.0 |
| 6 M −80° C. | 0.0 | 100.0 |
| 3 M 5° C. | 0.0/0.0* | 100.0/100.0* |
| 6 M 5° C. | 0.0/0.0* | 100.0/100.0* |
| 1 M 25° C. | 13.6 | 86.5 |
| 3 M 25° C. | 41.1 | 58.9 |
| 6 M 25° C. | 37.1 | 62.9 |
| 1 M 40° C. | 15.3 | 84.8 |
| 2 M 40° C. | 15.0 | 85.0 |
| 3 M 40° C. | 17.1 | 82.9 |

| | Acidic | Main | Basic |
|---|---|---|---|
| Timepoint and condition | [area %] | [area %] | [area %] |
| T0 | 8.4/10.2* | 81.9/80.4* | 9.8/9.5* |
| F/T | 11.9 | 84.8 | 3.4 |
| 6 M −80° C. | 13.3 | 82.8 | 3.9 |
| 3 M 5° C. | 11.4/13.6* | 84.1/82.3* | 4.5/4.1* |
| 6 M 5° C. | 13.9/16.3* | 82.2/80.1* | 3.9/3.6* |
| 1 M 25° C. | 10.2 | 84.6 | 5.2 |
| 3 M 25° C. | 15.2 | 77.2 | 7.6 |
| 6 M 25° C. | 16.0 | 78.7 | 5.3 |
| 1 M 40° C. | 10.0 | 84.0 | 6.0 |
| 2 M 40° C. | 10.9 | 79.2 | 9.9 |
| 3 M 40° C. | 10.5 | 80.1 | 9.4 |

Enzymatic activity assay [ACE2 enzymatic acivity]

| Timepoint and condition | [relative activity in %] |
|---|---|
| T0 | 92/79* |
| F/T | 82 |
| 6 M −80° C. | 92 |
| 3 M 5° C. | 129/81* |
| 6 M 5° C. | 97/107* |
| 1 M 25° C. | 106 |
| 3 M 25° C. | 138 |
| 6 M 25° C. | 109 |
| 1 M 40° C. | 108 |
| 2 M 40° C. | 104 |
| 3 M 40° C. | 144 |

Binding ELISA (quantification of potency
with regard to binding to the target)

| Timepoint and condition | [relative potency in %] |
|---|---|
| T0 | 100/107* |
| F/T | 103 |
| 6 M −80° C. | 103 |
| 3 M 5° C. | 146/134* |
| 1 M 25° C. | 144 |
| 3 M 25° C. | 76 |
| 2 M 40° C. | 74 |
| 3 M 40° C. | 61 |

pH (Ph. Eur. 2.2.3)

| Timepoint and condition | [- log (H⁺)] |
|---|---|
| T0 | 5.8 |
| F/T | 5.9 |
| 6 M −80° C. | 5.8 |
| 3 M 5° C. | 5.8 |
| 6 M 5° C. | 5.9 |
| 3 M 25° C. | 5.9 |
| 6 M 25° C. | 5.9 |
| 2 M 40° C. | 6.0 |
| 3 M 40° C. | 6.0 |

Subvisible particles (Ph. Eur. 2.9.19)

| | [Particles ≥10 μm/ | [Particles ≥25 μm/ |
|---|---|---|
| Timepoint and condition | container] | container] |
| T0 | 49/10* | 1/1* |
| 3 M 25° C. | 23 | 2 |
| 2 M 40° C. | 80 | 1 |
| 3 M 40° C. | 870 | 15 |

Visible particles (Ph. Eur. 2.9.20)

| Timepoint and condition | [visual inspection] |
|---|---|
| T0 | Essentially free of particles/ |
| | Essentially free of particles* |
| 3 M 40° C. | Essentially free of particles |

Polysorbate 20 (concentration)

| Timepoint and condition | [mg/mL] |
|---|---|
| T0 | 0.20 |
| F/T | 0.20 |

Osmolality (Ph. Eur. 2.2.35)

| Timepoint and condition | [mOsm/kg] |
|---|---|
| T0 | 445 |
| 6 M −80° C. | 448 |
| 3 M 5° C. | 452 |
| 6 M 5° C. | 449 |
| 3 M 25° C. | 450 |
| 6 M 25° C. | 455 |
| 2 M 40° C. | 444 |
| 3 M 40° C. | 453 |

Clarity (Ph. Eur. 2.2.1)

| Timepoint and condition | [comparison to reference suspension] |
|---|---|
| T0 | ≤ Reference solution II |
| F/T | ≤ Reference solution II |
| 6 M −80° C. | ≤ Reference solution I |
| 3 M 5° C. | ≤ Reference solution III |
| 6 M 5° C. | ≤ Reference solution I |
| 6 M 25° C. | ≤ Reference solution II |
| 3 M 40° C. | ≤ Reference solution III |

Color (Ph. Eur. 2.2.2)

| Timepoint and condition | [comparison to reference solution] |
|---|---|
| T0 | ≤ BY4 |
| F/T | ≤ BY4 |
| 3 M 5° C. | ≤ BY4 |
| 3 M 40° C. | ≤ BY4 |

*results from batch 1 are shown on the left hand side and results of batch two are shown on the right hand side, respectively.

[0779] The following trends were observed for ACE2(18-732)-IgG4 normal sialylated.

[0780] The sample concentration remained constant within method variability for 6 months at 5° C., at −80° C. as well as for the F/T condition. Due to the low fill volume of 1 mL concomitant with little evaporation, for elevated temperatures (25° C. and 40° C.) a slight increase can be observed for the concentration over time.

[0781] Aggregates were analysed with SE-HPLC and the total HMWS area % remained constant within method variability for 6 months at 5° C. and at −80° C. as well as for the F/T condition. For elevated temperatures (25° C. and 40° C.) an increase in total HMWS area % as well as total LMWS area % was observed over time, which identifies the method to be stability indicating.

[0782] Fragmentation was further analysed with CE-SDS non-reduced and the total LMWS area % remained constant for 6 months at 5° C. and at −80° C. as well as for the F/T condition. For elevated temperatures (25° C. and 40° C.) an increase in total LMWS area % was observed overtime, which identifies the method to be stability indicating.

[0783] With regard to charged species, the percentage of acidic species slightly increased over time upon storage at 5° C. This trend was also observed at elevated temperatures (25° C. and 40° C.), which identifies the method to be stability indicating.

[0784] All samples analysed show comparable enzymatic activity scattering around the mean. For the binding ELISA, the potency remained constant within assay variability for 3 months at 5° C. and for 6 months at −80° C. as well as for the F/T condition. For elevated temperatures (25° C. and 40° C.) a decrease in potency was observed over time, which identifies the method to be stability indicating.

[0785] The pH value remained constant within method variability for 6 months at 5° C. and at −80° C. as well as for the F/T condition. For elevated temperatures (25° C. and 40° C.) a slight increase in pH was observed overtime.

[0786] Subvisible particles were at a low level and increased overtime at elevated temperatures (25° C. and 40° C.) as expected.

[0787] The vials of the stability study were essentially free of visible particles for the conditions tested.

[0788] The polysorbate concentration as well as osmolality remained constant and scattered around the mean.

[0789] Clarity and color remained constant within the acceptable limit.

[0790] Some embodiments of the present invention relate to:

[0791] 1. A liquid pharmaceutical composition comprising:
[0792] (a) a fusion protein comprising a first part comprising a fragment of human ACE2 or a variant of said fragment, said human ACE2 having the amino acid sequence according to SEQ ID No. 1, and a second part comprising the Fc portion of a human IgG; and
[0793] (b) a buffer having a pH of 5.4 to 6.3.

[0794] 2. The liquid pharmaceutical composition according to item 1, wherein the buffer is selected from the group consisting of acetate buffer, histidine buffer, phosphate buffer, citrate buffer and succinate buffer.

[0795] 3. The liquid pharmaceutical composition according to item 1 or 2, wherein the buffer is present in a concentration of 5 mM to 60 mM.

[0796] 4. A liquid pharmaceutical composition comprising:
[0797] (a) a fusion protein comprising a first part comprising a fragment of human ACE2 or a variant of said fragment, said human ACE2 having the amino acid sequence according to SEQ ID No. 1, and a second part comprising the Fc portion of a human IgG or a variant of the Fc portion of a human IgG; and
[0798] (b) an acetate buffer having a pH of 5.4 to 6.0.

[0799] 5. The liquid pharmaceutical composition according to item 4, wherein the acetate buffer is present in a concentration of 5 mM to 60 mM.

[0800] 6. The liquid pharmaceutical composition according to any one of the preceding items, further comprising a sugar or a sugar alcohol.

[0801] 7. The liquid pharmaceutical composition according to item 6, wherein the sugar is selected from trehalose and sucrose.

[0802] 8. The liquid pharmaceutical composition according to item 6 or 7, wherein the sugar is present in a concentration of 100 mM to 300 mM.

[0803] 9. The liquid pharmaceutical composition according to any one of the preceding items, further comprising a non-ionic surfactant.

[0804] 10. The liquid pharmaceutical composition according to item 9, wherein the non-ionic surfactant is selected from polysorbate 20 and polysorbate 80.

[0805] 11. The liquid pharmaceutical composition according to item 9 or 10, wherein the non-ionic surfactant is present in a concentration of 0.01% (w/v) to 0.2% (w/v).

[0806] 12. The liquid pharmaceutical composition according to any one of the preceding items, further comprising an inorganic salt.

[0807] 13. The liquid pharmaceutical composition according to item 12, wherein the inorganic salt is sodium chloride.

[0808] 14. The liquid pharmaceutical composition according to item 12 or 13, wherein the inorganic salt is present in a concentration of 30 mM to 150 mM.

[0809] 15. The liquid pharmaceutical composition according to any one of the preceding items, further comprising one or more amino acids.

[0810] 16. The liquid pharmaceutical composition according to item 15, wherein the one or more amino acids are L-arginine and/or L-methionine.

[0811] 17. The liquid pharmaceutical composition according to item 15 or 16, wherein the one or more amino acids are present in a concentration of 1 mM to 50 mM.

[0812] 18. The liquid pharmaceutical composition according to any one of the preceding items, wherein the fragment of human ACE2 consists of the amino acid sequence according to SEQ ID No. 2.

[0813] 19. The liquid pharmaceutical composition according to any one of items 1 to 17, wherein the fragment of human ACE2 is the extracellular domain of ACE2 consisting of the amino acid sequence according to SEQ ID No. 3.

[0814] 20. The liquid pharmaceutical composition according to any one of the preceding items, wherein the IgG is IgG1 or IgG4.

[0815] 21. The liquid pharmaceutical composition according to any one of the preceding items, wherein the fusion protein comprises the Fc portion of human IgG4 comprising the amino acid sequence according to SEQ ID NO: 5.

[0816] 22. The liquid pharmaceutical composition according to any one of items 4 to 20, wherein the fusion protein comprises a variant of the Fc portion of human IgG4 comprising the amino acid sequence according to any one of SEQ ID NOs: 20 and 21.

[0817] 23. The liquid pharmaceutical composition according to any one of the preceding items, wherein the IgG is IgG4 or a variant of IgG4 and the first part and the second part are linked by the amino acid sequence according to SEQ ID No. 18.

[0818] 24. The liquid pharmaceutical composition according to any one of items 1 to 20, wherein the fusion protein comprises the Fc portion of human IgG1 comprising the amino acid sequence according to SEQ ID NO: 4.

[0819] 25. The liquid pharmaceutical composition according to any one of items 4 to 20, wherein the fusion protein comprises a variant of the Fc portion of human IgG1 comprising the amino acid sequence according to any one of SEQ ID NOs: 22 and 23.

[0820] 26. The liquid pharmaceutical composition according to any one of items 1 to 20, 24 or 25, wherein the IgG is IgG1 or a variant of IgG1 and the first part and the second part are linked by the amino acid sequence according to SEQ ID No. 19.

[0821] 27. The liquid pharmaceutical composition according to any one of the preceding items, wherein the variant of the human ACE2 fragment is an enzymatically inactive variant of human ACE2.

[0822] 28. The liquid pharmaceutical composition according to item 27, wherein the enzymatically inactive variant of human ACE2 comprises a H374N and a H378N mutation, the numbering referring to SEQ ID No. 1.

[0823] 29. The liquid pharmaceutical composition according to any one of items 1 to 17, wherein the fusion protein has the amino acid sequence according to any one of SEQ ID Nos. 6 to 13, 44 to 47, 58 to 61, 72 to 75, 86 to 89.

[0824] 30. The liquid pharmaceutical composition according to any one of items 4 to 17, wherein the fusion protein has the amino acid sequence according to any one of SEQ ID Nos 26 to 41, 48 to 55, 62 to 69, 76 to 83 and 90 to 97.

[0825] 31. The liquid pharmaceutical composition according to any one of the preceding items, wherein the ACE2 part of the fusion protein is N-glycosylated and 70% to 95% of the N-glycans on the ACE2 part have at least one sialic acid molecule attached thereto.

[0826] 32. The liquid pharmaceutical composition according to any one of the preceding items, wherein the concentration of the ACE2 Fc fusion protein is 1-60 mg/ml.

[0827] 33. A liquid pharmaceutical composition comprising:
[0828] (a) a fusion protein comprising a first part comprising a fragment of human ACE2 or a variant of said fragment, said human ACE2 having the amino acid sequence according to SEQ ID No. 1, and a second part comprising the Fc portion of a human IgG or a variant of the Fc portion of a human IgG; and
[0829] (b) a histidine or acetate buffer having a pH of 5.6 to 6.0;
[0830] (c) a non-ionic surfactant selected from polysorbate 20 and polysorbate 80;
[0831] (d) a sugar selected from sucrose and trehalose; and
[0832] (e) optionally, an inorganic salt and/or one or more amino acids.

[0833] 34. The liquid pharmaceutical composition according to item 33, wherein the histidine or acetate buffer is present in a concentration of 5 mM to 60 mM.

[0834] 35. The liquid pharmaceutical composition according to item 33 or 34, wherein the sugar is present in a concentration of 100 mM to 300 mM.

[0835] 36. The liquid pharmaceutical composition according to any one of items 33 to 35, wherein the non-ionic surfactant is present in a concentration of 0.01% (w/v) to 0.2% (w/v).

[0836] 37. The liquid pharmaceutical composition according to any one of items 33 to 36, further comprising an inorganic salt.

[0837] 38. The liquid pharmaceutical composition according to item 37, wherein the inorganic salt is sodium chloride.

[0838] 39. The liquid pharmaceutical composition according to item 37 or 38, wherein the inorganic salt is present in a concentration of 30 mM to 150 mM.

[0839] 40. The liquid pharmaceutical composition according to any one items 33 to 39, further comprising one or more amino acids.

[0840] 41. The liquid pharmaceutical composition according to item 40, wherein the one or more amino acids are L-arginine and/or L-methionine.

[0841] 42. The liquid pharmaceutical composition according to item 40 or 41, wherein the one or more amino acids are present in a concentration of 1 mM to 50 mM.

[0842] 43. The liquid pharmaceutical composition according to any one of items 33 to 42, wherein the fragment of human ACE2 consists of the amino acid sequence according to SEQ ID No. 2.

[0843] 44. The liquid pharmaceutical composition according to any one of items 33 to 42, wherein the fragment of human ACE2 is the extracellular domain of ACE2 consisting of the amino acid sequence according to SEQ ID No. 3.

[0844] 45. The liquid pharmaceutical composition according to any one of items 33 to 44, wherein the IgG is IgG1 or IgG4.

[0845] 46. The liquid pharmaceutical composition according to any one of items 33 to 45, wherein the fusion protein comprises the Fc portion of human IgG4 comprising the amino acid sequence according to SEQ ID NO: 5 or a variant of the Fc portion of human IgG4 comprising the amino acid sequence according to any one of SEQ ID NOs: 20 and 21.

[0846] 47. The liquid pharmaceutical composition according to any one of items 33 to 46, wherein the IgG is IgG4 or a variant of IgG4 and the first part and the second part are linked by the amino acid sequence according to SEQ ID No. 18.

[0847] 48. The liquid pharmaceutical composition according to any one of items 33 to 45, wherein the fusion protein comprises the Fc portion of human IgG1 comprising the amino acid sequence according to SEQ ID NO: 4 or a variant of the Fc portion of human IgG1 comprising the amino acid sequence according to any one of SEQ ID NOs: 22 and 23.

[0848] 49. The liquid pharmaceutical composition according to any one of items 33 to 45 and 48, wherein the IgG is IgG1 or a variant of IgG1 and the first part and the second part are linked by the amino acid sequence according to SEQ ID No. 19.

[0849] 50. The liquid pharmaceutical composition according to any one of items 33 to 49, wherein the variant of the human ACE2 fragment is an enzymatically inactive variant of human ACE2.

[0850] 51. The liquid pharmaceutical composition according to item 50, wherein the enzymatically inactive variant of human ACE2 comprises a H374N and a H378N mutation, the numbering referring to SEQ ID No. 1.

[0851] 52. The liquid pharmaceutical composition according to any one of items 33 to 42, wherein the fusion protein has the amino acid sequence according to any one of SEQ ID Nos. 6 to 13, 26 to 41, 44 to 55, 58 to 69, 72 to 83 and 86 to 97.

[0852] 53. The liquid pharmaceutical composition according to any one of items 33 to 52, wherein the ACE2 part of the fusion protein is N-glycosylated and 70% to 95% of the N-glycans on the ACE2 part have at least one sialic acid molecule attached thereto.

[0853] 54. The liquid pharmaceutical composition according to any one of items 33 to 53, wherein the concentration of the ACE2 Fc fusion protein is 1-60 mg/ml.

[0854] 55. A liquid pharmaceutical composition comprising:
[0855] (a) a fusion protein comprising a first part comprising a fragment of human ACE2 or a variant of said fragment, said human ACE2 having the amino acid sequence according to SEQ ID No. 1, and a second part comprising the Fc portion of a human IgG or a variant of the Fc portion of a human IgG; and
[0856] (b) a histidine buffer having a pH of 6.0;
[0857] (c) polysorbate 20;
[0858] (d) trehalose or sucrose; and
[0859] (e) optionally, one or more stabilizers selected from the group consisting of arginine, methionine and sodium chloride.

[0860] 56. The liquid pharmaceutical composition according to item 55, wherein the histidine buffer is present in a concentration of 5 mM to 60 mM.

[0861] 57. The liquid pharmaceutical composition according to item 55 or 56, wherein the formulation comprises trehalose which is present in a concentration of 100 mM to 300 mM.

[0862] 58. The liquid pharmaceutical composition according to any one of items 55 to 57, wherein the non-ionic surfactant is present in a concentration of 0.01% (w/v) to 0.2% (w/v).

[0863] 59. The liquid pharmaceutical composition according to any one of items 55 to 58, further comprising sodium chloride.

[0864] 60. The liquid pharmaceutical composition according to item 59, wherein the sodium chloride is present in a concentration of 30 mM to 150 mM.

[0865] 61. The liquid pharmaceutical composition according to any one of items 55 to 60, wherein the arginine is present in a concentration of 10 mM to 50 mM.

[0866] 62. The liquid pharmaceutical composition according to any one of items 55 to 61, wherein the methionine is present in a concentration of 1 mM to 20 mM.

[0867] 63. The liquid pharmaceutical composition according to any one of items 55 to 62, wherein the fragment of human ACE2 consists of the amino acid sequence according to SEQ ID No. 2.

[0868] 64. The liquid pharmaceutical composition according to any one of items 55 to 62, wherein the fragment of human ACE2 is the extracellular domain of ACE2 consisting of the amino acid sequence according to SEQ ID No. 3.

[0869] 65. The liquid pharmaceutical composition according to any one of items 55 to 64, wherein the IgG is IgG1 or IgG4.

[0870] 66. The liquid pharmaceutical composition according to any one of items 55 to 65, wherein the fusion protein comprises the Fc portion of human IgG4 comprising the amino acid sequence according to SEQ ID NO: 5 or a variant of the Fc portion of human IgG4 comprising the amino acid sequence according to any one of SEQ ID NOs: 20 and 21.

[0871] 67. The liquid pharmaceutical composition according to any one of items 55 to 66, wherein the IgG is IgG4 and the first part and the second part are linked by the amino acid sequence according to SEQ ID No. 18.

[0872] 68. The liquid pharmaceutical composition according to any one of items 55 to 65, wherein the fusion protein comprises the Fc portion of human IgG1 comprising the amino acid sequence according to SEQ ID NO: 4 or a variant of the Fc portion of human IgG1 comprising the amino acid sequence according to any one of SEQ ID NOs: 22 and 23.

[0873] 69. The liquid pharmaceutical composition according to any one of items 55 to 65 and 68, wherein the IgG is IgG1 and the first part and the second part are linked by the amino acid sequence according to SEQ ID No. 19.

[0874] 70. The liquid pharmaceutical composition according to any one of items 55 to 69, wherein the variant of the human ACE2 fragment is an enzymatically inactive variant of human ACE2.

[0875] 71. The liquid pharmaceutical composition according to item 70, wherein the enzymatically inactive variant of human ACE2 comprises a H374N and a H378N mutation, the numbering referring to SEQ ID No. 1.

[0876] 72. The liquid pharmaceutical composition according to any one of items 55 to 62, wherein the fusion protein has the amino acid sequence according to any one of SEQ ID Nos. 6 to 13, 26 to 41, 44 to 55, 58 to 69, 72 to 83 and 86 to 97.

[0877] 73. The liquid pharmaceutical composition according to any one of items 55 to 72, wherein the ACE2 part of the fusion protein is N-glycosylated and 70% to 95% of the N-glycans on the ACE2 part have at least one sialic acid molecule attached thereto.

[0878] 74. The liquid pharmaceutical composition according to any one of items 55 to 73, wherein the concentration of the ACE2 Fc fusion protein is 1-60 mg/ml.

[0879] 75. A liquid pharmaceutical composition comprising a fusion protein according to SEQ ID No. 6 or 10, histidine buffer having a pH of 6.0, polysorbate 20, trehalose, L-arginine and water for injection.

[0880] 76. The liquid pharmaceutical composition according to item 75, comprising 1 to 60 mg/ml of a fusion protein according to SEQ ID No. 6 or 10, 10 mM histidine buffer having a pH of 6.0, 0.02% (w/v) polysorbate 20, 220 mM trehalose, 30 mM L-arginine and water for injection.

[0881] 77. A liquid pharmaceutical composition consisting of a fusion protein according to SEQ ID No. 6 or 10, histidine buffer having a pH of 6.0, polysorbate 20, trehalose, L-arginine and water for injection.

[0882] 78. The liquid pharmaceutical composition according to item 77, consisting of 1 to 60 mg/ml of a fusion protein according to SEQ ID No. 6 or 10, 10 mM histidine buffer having a pH of 6.0, 0.02% (w/v) polysorbate 20, 220 mM trehalose, 30 mM L-arginine and water for injection.

[0883] 79. A liquid pharmaceutical composition comprising a fusion protein according to SEQ ID No. 6 or 10, histidine buffer having a pH of 6.0, polysorbate 20, trehalose, L-methionine and water for injection.

[0884] 80. The liquid pharmaceutical composition according to item 79, comprising 1 to 60 mg/ml of a fusion protein according to SEQ ID No. 6 or 10, 10 mM histidine buffer having a pH of 6.0, 0.02% (w/v) polysorbate 20, 250 mM trehalose, 5 mM L-methionine and water for injection.

[0885] 81. A liquid pharmaceutical composition consisting of a fusion protein according to SEQ ID No. 6 or 10, histidine buffer having a pH of 6.0, polysorbate 20, trehalose, L-methionine and water for injection.

[0886] 82. The liquid pharmaceutical composition according to item 81, consisting of 1 to 60 mg/ml of a fusion protein according to SEQ ID No. 6 or 10, 10 mM histidine buffer having a pH of 6.0, 0.02% (w/v) polysorbate 20, 250 mM trehalose, 5 mM L-methionine and water for injection.

[0887] 83. A liquid pharmaceutical composition comprising a fusion protein according to SEQ ID No. 6 or 10, histidine buffer having a pH of 6.0, polysorbate 20, sucrose, sodium chloride and water for injection.

[0888] 84. The liquid pharmaceutical composition according to item 83, comprising 1 to 60 mg/ml of a fusion protein according to SEQ ID No. 6 or 10, 10 mM histidine buffer having a pH of 6.0, 0.02% (w/v) polysorbate 20, 145 mM sucrose, 40 mM sodium chloride and water for injection.

[0889] 85. A liquid pharmaceutical composition consisting of a fusion protein according to SEQ ID No. 6 or 10, histidine buffer having a pH of 6.0, polysorbate 20, sucrose, sodium chloride and water for injection.

[0890] 86. The liquid pharmaceutical composition according to item 85, consisting of 1 to 60 mg/ml of a fusion protein according to SEQ ID No. 6 or 10, 10 mM histidine buffer having a pH of 6.0, 0.02% (w/v) polysorbate 20, 145 mM sucrose, 40 mM sodium chloride and water for injection.

[0891] 87. A liquid pharmaceutical composition comprising:
[0892] (a) a fusion protein comprising a first part comprising a fragment of human ACE2 or a variant of said fragment, said human ACE2 having the amino acid sequence according to SEQ ID No. 1, and a second part comprising the Fc portion of a human IgG or a variant of the Fc portion of a human IgG; and
[0893] (b) an acetate buffer having a pH of 5.6 to 5.8;
[0894] (c) polysorbate 20 or polysorbate 80;
[0895] (d) trehalose or sucrose; and
[0896] (e) optionally, one or more stabilizers selected from the group consisting of L-arginine, L-methionine and sodium chloride.

[0897] 88. The liquid pharmaceutical composition according to item 87, wherein the acetate buffer is present in a concentration of 5 mM to 60 mM.

[0898] 89. The liquid pharmaceutical composition according to item 87 or 88, wherein the formulation comprises trehalose which is present in a concentration of 100 mM to 250 mM.

[0899] 90. The liquid pharmaceutical composition according to item 87 or 88, wherein the formulation comprises sucrose which is present in a concentration of 150 mM to 300 mM.

[0900] 91. The liquid pharmaceutical composition according to any one of items 87 to 90, wherein the formulation comprises polysorbate 20 which is present in a concentration of 0.01% (w/v) to 0.2% (w/v).

[0901] 92. The liquid pharmaceutical composition according to any one of items 87 to 90, wherein the formulation comprises polysorbate 80 which is present in a concentration of 0.01% (w/v) to 0.2% (w/v).

[0902] 93. The liquid pharmaceutical composition according to any one of items 87 to 92, further comprising sodium chloride.

[0903] 94. The liquid pharmaceutical composition according to item 93, wherein the sodium chloride is present in a concentration of 30 mM to 150 mM.

[0904] 95. The liquid pharmaceutical composition according to any one of items 87 to 94, wherein the L-arginine is present in a concentration of 10 mM to 50 mM.

[0905] 96. The liquid pharmaceutical composition according to any one of items 87 to 95, wherein the L-methionine is present in a concentration of 1 mM to 20 mM.

[0906] 97. The liquid pharmaceutical composition according to any one of items 87 to 96, wherein the fragment of human ACE2 consists of the amino acid sequence according to SEQ ID No. 2.

[0907] 98. The liquid pharmaceutical composition according to any one of items 87 to 96, wherein the fragment of human ACE2 is the extracellular domain of ACE2 consisting of the amino acid sequence according to SEQ ID No. 3.

[0908] 99. The liquid pharmaceutical composition according to any one of items 87 to 98, wherein the IgG is IgG1 or IgG4.

[0909] 100. The liquid pharmaceutical composition according to any one of items 87 to 99, wherein the fusion protein comprises the Fc portion of human IgG4 comprising the amino acid sequence according to SEQ ID NO: 5 or a variant of the Fc portion of human IgG4 comprising the amino acid sequence according to any one of SEQ ID NOs: 20 and 21.

[0910] 101. The liquid pharmaceutical composition according to any one of items 87 to 100, wherein the IgG is IgG4 and the first part and the second part are linked by the amino acid sequence according to SEQ ID No. 18.

[0911] 102. The liquid pharmaceutical composition according to any one of items 87 to 99, wherein the fusion protein comprises the Fc portion of human IgG1 comprising the amino acid sequence according to SEQ ID NO: 4 or a variant of the Fc portion of human IgG1 comprising the amino acid sequence according to any one of SEQ ID NOs: 22 and 23.

[0912] 103. The liquid pharmaceutical composition according to any one of items 87 to 99 and 102, wherein the IgG is IgG1 and the first part and the second part are linked by the amino acid sequence according to SEQ ID No. 19.

[0913] 104. The liquid pharmaceutical composition according to any one of items 87 to 103, wherein the variant of the human ACE2 fragment is an enzymatically inactive variant of human ACE2.

[0914] 105. The liquid pharmaceutical composition according to item 104, wherein the enzymatically inactive variant of human ACE2 comprises a H374N and a H378N mutation, the numbering referring to SEQ ID No. 1.

[0915] 106. The liquid pharmaceutical composition according to any one of items 87 to 96, wherein the fusion protein has the amino acid sequence according to any one of SEQ ID Nos. 6 to 13, 26 to 41, 44 to 55, 58 to 69, 72 to 83 and 86 to 97.

[0916] 107. The liquid pharmaceutical composition according to any one of items 87 to 106, wherein the ACE2 part of the fusion protein is N-glycosylated and 70% to 95% of the N-glycans on the ACE2 part have at least one sialic acid molecule attached thereto.

[0917] 108. The liquid pharmaceutical composition according to any one of items 87 to 107, wherein the concentration of the ACE2 Fc fusion protein is 1-60 mg/ml.

[0918] 109. A liquid pharmaceutical composition comprising a fusion protein according to SEQ ID No. 6 or 10, acetate buffer having a pH of 5.8, polysorbate 20, trehalose, sodium chloride, L-arginine, L-methionine and water for injection.

[0919] 110. The liquid pharmaceutical composition according to item 109, comprising 1 to 60 mg/ml of a fusion protein according to SEQ ID No. 6 or 10, 10 mM acetate buffer having a pH of 5.8, 0.02% (w/v) polysorbate 20, 250 mM trehalose, 50 mM sodium chloride, 30 mM L-arginine, 5 mM L-methionine and water for injection.

[0920] 111. A liquid pharmaceutical composition consisting of a fusion protein according to SEQ ID No. 6 or 10, acetate buffer having a pH of 5.8, polysorbate 20, trehalose, sodium chloride, L-arginine, L-methionine and water for injection.

[0921] 112. The liquid pharmaceutical composition according to item 111, consisting of 1 to 60 mg/ml of a fusion protein according to SEQ ID No. 6 or 10, 10 mM acetate buffer having a pH of 5.8, 0.02% (w/v) polysorbate 20, 250 mM trehalose, 50 mM sodium chloride, 30 mM L-arginine, 5 mM L-methionine and water for injection.

[0922] 113. A liquid pharmaceutical composition comprising a fusion protein according to SEQ ID No. 6 or 10, acetate buffer having a pH of 5.8, polysorbate 20, sucrose, and water for injection.

[0923] 114. The liquid pharmaceutical composition according to item 113, comprising 1 to 60 mg/ml of a fusion protein according to SEQ ID No. 6 or 10, 10 mM acetate buffer having a pH of 5.8, 0.02% (w/v) polysorbate 20, 263 mM sucrose and water for injection.

[0924] 115. A liquid pharmaceutical composition consisting of a fusion protein according to SEQ ID No. 6 or 10, acetate buffer having a pH of 5.8, polysorbate 20, sucrose, and water for injection.

[0925] 116. The liquid pharmaceutical composition according to item 115, consisting of 1 to 60 mg/ml of a fusion protein according to SEQ ID No. 6 or 10, 10 mM acetate buffer having a pH of 5.8, 0.02% (w/v) polysorbate 20, 263 mM sucrose and water for injection.

[0926] 117. A liquid pharmaceutical composition comprising a fusion protein according to SEQ ID No. 6 or 10, acetate buffer having a pH of 5.6, polysorbate 20, trehalose and water for injection.

[0927] 118. The liquid pharmaceutical composition according to item 117, comprising 1 to 60 mg/ml of a fusion protein according to SEQ ID No. 6 or 10, 20 mM acetate buffer having a pH of 5.6, 0.02% (w/v) polysorbate 20, 106 mM trehalose and water for injection.

[0928] 119. A liquid pharmaceutical composition consisting of a fusion protein according to SEQ ID No. 6 or 10, acetate buffer having a pH of 5.6, polysorbate 20, trehalose and water for injection.

[0929] 120. The liquid pharmaceutical composition according to item 119, consisting of 1 to 60 mg/ml of a fusion protein according to SEQ ID No. 6 or 10, 20 mM acetate buffer having a pH of 5.6, 0.02% (w/v) polysorbate 20, 106 mM trehalose and water for injection.

[0930] 121. A liquid pharmaceutical composition comprising a fusion protein according to SEQ ID No. 7 or 27, acetate buffer having a pH of 5.8, polysorbate 20, trehalose, sodium chloride, L-arginine, L-methionine and water for injection.

[0931] 122. The liquid pharmaceutical composition according to item 121, comprising 1 to 60 mg/ml of a fusion protein according to SEQ ID No. 7 or 27, 10 mM acetate buffer having a pH of 5.8, 0.02% (w/v) polysorbate 20, 250 mM trehalose, 50 mM sodium chloride, 30 mM L-arginine, 5 mM L-methionine and water for injection.

[0932] 123. A liquid pharmaceutical composition consisting of a fusion protein according to SEQ ID No. 7 or 27, acetate buffer having a pH of 5.8, polysorbate 20, trehalose, sodium chloride, L-arginine, L-methionine and water for injection.

[0933] 124. The liquid pharmaceutical composition according to item 123, consisting of 1 to 60 mg/ml of a fusion protein according to SEQ ID No. 7 or 27, 10 mM acetate buffer having a pH of 5.8, 0.02% (w/v) polysorbate 20, 250 mM trehalose, 50 mM sodium chloride, 30 mM L-arginine, 5 mM L-methionine and water for injection.

[0934] 125. A liquid pharmaceutical composition comprising a fusion protein according to SEQ ID No. 7 or 27, acetate buffer having a pH of 5.8, polysorbate 20, sucrose, and water for injection.

[0935] 126. The liquid pharmaceutical composition according to item 125, comprising 1 to 60 mg/ml of a fusion protein according to SEQ ID No. 7 or 27, 10 mM acetate buffer having a pH of 5.8, 0.02% (w/v) polysorbate 20, 263 mM sucrose and water for injection.

[0936] 127. A liquid pharmaceutical composition consisting of a fusion protein according to SEQ ID No. 7 or 27, acetate buffer having a pH of 5.8, polysorbate 20, sucrose, and water for injection.

[0937] 128. The liquid pharmaceutical composition according to item 127, consisting of 1 to 60 mg/ml of a fusion protein according to SEQ ID No. 7 or 27, 10 mM acetate buffer having a pH of 5.8, 0.02% (w/v) polysorbate 20, 263 mM sucrose and water for injection.

[0938] 129. A liquid pharmaceutical composition comprising a fusion protein according to SEQ ID No. 7 or 27, acetate buffer having a pH of 5.6, polysorbate 20, trehalose and water for injection.

[0939] 130. The liquid pharmaceutical composition according to item 129, comprising 1 to 60 mg/ml of a fusion protein according to SEQ ID No. 7 or 27, 20 mM acetate buffer having a pH of 5.6, 0.02% (w/v) polysorbate 20, 106 mM trehalose and water for injection.

[0940] 131. A liquid pharmaceutical composition consisting of a fusion protein according to SEQ ID No. 7 or 27, acetate buffer having a pH of 5.6, polysorbate 20, trehalose and water for injection.

[0941] 132. The liquid pharmaceutical composition according to item 131, consisting of 1 to 60 mg/ml of a fusion protein according to SEQ ID No. 7 or 27, 20 mM acetate buffer having a pH of 5.6, 0.02% (w/v) polysorbate 20, 106 mM trehalose and water for injection.

[0942] 133. The liquid pharmaceutical composition according to any one of items 120 to 132, wherein the ACE2 part of the fusion protein is N-glycosylated and 70% to 95% of the N-glycans on the ACE2 part have at least one sialic acid molecule attached thereto.

[0943] 134. The liquid pharmaceutical composition according to any one of the preceding items for use in preventing and/or treating an infection with a coronavirus binding to ACE2.

[0944] 135. The liquid pharmaceutical composition for use according to item 134, wherein the coronavirus binding to ACE2 is selected from the group consisting of SARS, SARS-CoV2 and NL63, preferably it is SARS-CoV2.

[0945] 136. The liquid pharmaceutical composition for use according to item 134 or 135, wherein the liquid pharmaceutical composition is to be administered in combination with an anti-viral agent.

[0946] 137. The liquid pharmaceutical composition for use according to item 131, wherein the anti-viral agent is selected from the group consisting of remdesivir, arbidol HCl, ritonavir, lopinavir, darunavir, ribavirin, chloroquin and derivatives thereof, nitazoxanide, camostat mesilate, tocilizumab, siltuximab, sarilumab, paxlovid and baricitinib phosphate.

[0947] 138. The liquid pharmaceutical composition according to any one of items 1 to 133 for use in treating hypertension (including high blood pressure), congestive heart failure, chronic heart failure, acute heart failure, contractile heart failure, myocardial infarction, arteriosclerosis, kidney failure, renal failure, Acute Respiratory Distress Syndrome (ARDS), Acute Lung Injury (ALI), chronic obstructive pulmonary disease (COPD), pulmonary hypertension, renal fibrosis, chronic renal failure, acute renal failure, acute kidney injury, inflammatory bowel disease and multi-organ dysfunction syndrome.

1. A liquid pharmaceutical composition comprising:
(a) a fusion protein comprising a first part comprising a fragment of human ACE2 or a variant of said fragment, said human ACE2 having the amino acid sequence according to SEQ ID No. 1, and a second part comprising the Fc portion of a human IgG; and
(b) a buffer having a pH of 5.4 to 6.4.

2. A liquid pharmaceutical composition comprising:
(a) a fusion protein comprising a first part comprising a fragment of human ACE2 or a variant of said fragment, said human ACE2 having the amino acid sequence according to SEQ ID No. 1, and a second part comprising a variant of the Fc portion of a human IgG; and
(b) a buffer having a pH of 5.4 to 6.4.

3. The liquid pharmaceutical composition according to claim 2, wherein the buffer is selected from the group consisting of acetate buffer, histidine buffer, phosphate buffer, citrate buffer, and succinate buffer, preferably wherein the buffer is present in a concentration of 5 mM to 60 mM.

4. The liquid pharmaceutical composition according to claim 2, further comprising a sugar or a sugar alcohol, preferably wherein the sugar or sugar alcohol is selected from trehalose, sucrose and mannitol and/or wherein the sugar or sugar alcohol is present in a concentration of 100 mM to 300 mM.

5. The liquid pharmaceutical composition according to claim 2, further comprising a non-ionic surfactant, preferably wherein the non-ionic surfactant is selected from polysorbate 20 and polysorbate 80 and/or wherein the non-ionic surfactant is present in a concentration of 0.01% (w/v) to 0.2% (w/v).

6. The liquid pharmaceutical composition according to claim 2, further comprising an inorganic salt, preferably wherein the inorganic salt is sodium chloride and/or wherein the inorganic salt is present in a concentration of 30 mM to 150 mM.

7. The liquid pharmaceutical composition according to claim 2, further comprising one or more amino acids, preferably wherein the one or more amino acids are L-arginine and/or L-methionine and/or wherein the one or more amino acids are present in a concentration of 1 mM to 50 mM.

8. The liquid pharmaceutical composition according to claim 2, wherein the fragment of human ACE2 consists of the amino acid sequence according to SEQ ID No. 2 or wherein the fragment of human ACE2 is the extracellular domain of ACE2 consisting of the amino acid sequence according to SEQ ID No. 3.

9. The liquid pharmaceutical composition according to claim 2, wherein the IgG is IgG1 or IgG4.

10. The liquid pharmaceutical composition according to claim 1, wherein the fusion protein comprises the Fc portion of human IgG4 comprising the amino acid sequence according to SEQ ID NO: 5, preferably wherein the first part and the second part are linked by the amino acid sequence according to SEQ ID No. 18.

11. The liquid pharmaceutical composition according to claim 2, wherein the fusion protein comprises a variant of the Fc portion of human IgG4 comprising the amino acid sequence according to any one of SEQ ID NOs: 20 and 21, preferably wherein the first part and the second part are linked by the amino acid sequence according to SEQ ID No. 18.

12. The liquid pharmaceutical composition according to claim 1, wherein the fusion protein comprises the Fc portion of human IgG1 comprising the amino acid sequence according to SEQ ID NO: 4, preferably wherein the first part and the second part are linked by the amino acid sequence according to SEQ ID No. 19.

13. The liquid pharmaceutical composition according to claim 2, wherein the fusion protein comprises a variant of the Fc portion of human IgG1 comprising the amino acid sequence according to any one of SEQ ID NOs: 22 and 23, preferably wherein the first part and the second part are linked by the amino acid sequence according to SEQ ID No. 19.

14. The liquid pharmaceutical composition according to claim 2, wherein the variant of the human ACE2 fragment is an enzymatically inactive variant of human ACE2, preferably wherein the enzymatically inactive variant of human ACE2 comprises a H374N and a H378N mutation, the numbering referring to SEQ ID No. 1.

15. The liquid pharmaceutical composition according to claim 1, wherein the fusion protein has the amino acid sequence according to any one of SEQ ID Nos. 6 to 13, 44 to 47, 58 to 61, 72 to 75, 86 to 89.

16. The liquid pharmaceutical composition according to claim 2, wherein the fusion protein has the amino acid sequence according to any one of SEQ ID Nos. 26 to 41, 48 to 55, 62 to 69, 76 to 83 and 90 to 97.

17. The liquid pharmaceutical composition according to claim 2, wherein the ACE2 part of the fusion protein is N-glycosylated and 70% to 95% of the N-glycans on the ACE2 part have at least one sialic acid molecule attached thereto.

18. A liquid pharmaceutical composition comprising:
(a) a fusion protein comprising a first part comprising a fragment of human ACE2 or a variant of said fragment, said human ACE2 having the amino acid sequence according to SEQ ID No. 1, and a second part comprising the Fc portion of a human IgG or a variant of the Fc portion of a human IgG; and
(b) an acetate buffer having a pH of 5.6 to 5.8;
(c) polysorbate 20 or polysorbate 80;
(d) trehalose or sucrose; and
(e) optionally, one or more stabilizers selected from the group consisting of L-arginine, L-methionine and sodium chloride.

19. The liquid pharmaceutical composition according to claim 2, wherein the concentration of the ACE2 Fc fusion protein is 1-60 mg/ml.

20. The liquid pharmaceutical composition according to claim 2 for use in preventing and/or treating an infection with a coronavirus binding to ACE2, preferably wherein the coronavirus binding to ACE2 is selected from the group consisting of SARS, SARS-CoV2 and NL63, preferably it is SARS-CoV2.

The application's sequence listing, which the Patent Office published only in electronic form, follows.

SEQUENCE LISTING (170 sequences)

SEQ ID NO: 1 - protein, 805 aa, human [sequence omitted]

SEQ ID NO: 2 - protein, 715 aa, human
QSTIEEQAKTFLDKFNHEAEDLFYQSSLASWNYNTNITEENVQNMNNAGDKWSAFLKEQSTLAQMYPLQEIQNLTVKLQLQALQQNGSSVLSEDKSKRLNTILNTMSTIYSTGKVCNPDNPQECLLLEPGLNEIMANSLDYNERLWAWESWRSEVGKQLRPLYEEYVVLKNEMARANHYEDYGDYWRGDYEVNGVDGYDYSRGQLIEDVEHTFEEIKPLYEHLHAYVRAKLMNAYPSYISPIGCLPAHLLGDMWGRFWTNLYSLTVPFGQKPNIDVTDAMVDQAWDAQRIFKEAEKFFVSVGLPNMTQGFWENSMLTDPGNVQKAVCHPTAWDLGKGDFRILMCTKVTMDDFLTAHHEMGHIQYDMAYAAQPFLLRNGANEGFHEAVGEIMSLSAATPKHLKSIGLLSPDFQEDNETEINFLLKQALTIVGTLPFTYMLEKWRWMVFKGEIPKDQWMKKWWEMKREIVGVVEPVPHDETYCDPASLFHVSNDYSFIRYYTRTLYQFQFQEALCQAAKHEGPLHKCDISNSTEAGQKLFNMLRLGKSEPWTLALENVVGAKNMNVRPLLNYFEPLFTWLKDQNKNSFVGWSTDWSPYADQSIKVRISLKSALGDKAYEWNDNEMYLFRSSVAYAMRQYFLKVKNQMILFGEEDVRVANLKPRISFNFFVTAPKNVSDIIPRTEVEKAIRMSRSRINDAFRLNDNSLEFLGIQPTLG

SEQ ID NO: 3 - protein, 723 aa, human
QSTIEEQAKTFLDKFNHEAEDLFYQSSLASWNYNTNITEENVQNMNNAGDKWSAFLKEQSTLAQMYPLQEIQNLTVKLQLQALQQNGSSVLSEDKSKRLNTILNTMSTIYSTGKVCNPDNPQECLLLEPGLNEIMANSLDYNERLWAWESWRSEVGKQLRPLYEEYVVLKNEMARANHYEDYGDYWRGDYEVNGVDGYDYSRGQLIEDVEHTFEEIKPLYEHLHAYVRAKLMNAYPSYISPIGCLPAHLLGDMWGRFWTNLYSLTVPFGQKPNIDVTDAMVDQAWDAQRIFKEAEKFFVSVGLPNMTQGFWENSMLTDPGNVQKAVCHPTAWDLGKGDFRILMCTKVTMDDFLTAHHEMGHIQYDMAYAAQPFLLRNGANEGFHEAVGEIMSLSAATPKHLKSIGLLSPDFQEDNETEINFLLKQALTIVGTLPFTYMLEKWRWMVFKGEIPKDQWMKKWWEMKREIVGVVEPVPHDETYCDPASLFHVSNDYSFIRYYTRTLYQFQFQEALCQAAKHEGPLHKCDISNSTEAGQKLFNMLRLGKSEPWTLALENVVGAKNMNVRPLLNYFEPLFTWLKDQNKNSFVGWSTDWSPYADQSIKVRISLKSALGDKAYEWNDNEMYLFRSSVAYAMRQYFLKVKNQMILFGEEDVRVANLKPRISFNFFVTAPKNVSDIIPRTEVEKAIRMSRSRINDAFRLNDNSLEFLGIQPTLGPPNQPPVS

SEQ ID NO: 4 - protein, 216 aa, Homo sapiens
PELLGGPSVFLFPPKPKDTLMISRTPEVTCVVVDVSHEDPEVKFNWYVDGVEVHNAKTKPREEQYNSTYRVVSVLTVLHQDWLNGKEYKCKVSNKALPAPIEKTISKAKGQPREPQVYTLPPSRDELTKNQVSLTCLVKGFYPSDIAVEWESNGQPENNYKTTPPVLDSDGSFFLYSKLTVDKSRWQQGNVFSCSVMHEALHNHYTQKSLSLSPGK

SEQ ID NO: 5 - protein, 216 aa, human
PEFLGGPSVFLFPPKPKDTLMISRTPEVTCVVVDVSQEDPEVQFNWYVDGVEVHNAKTKPREEQFNSTYRVVSVLTVLHQDWLNGKEYKCKVSNKGLPSSIEKTISKAKGQPREPQVYTLPPSQEEMTKNQVSLTCLVKGFYPSDIAVEWESNGQPENNYKTTPPVLDSDGSFFLYSRLTVDKSRWQEGNVFSCSVMHEALHNHYTQKSLSLSLGK

SEQ ID NO: 6 - protein, 944 aa, artificial
  ACE2 18-732 with IgG4 wt
QSTIEEQAKTFLDKFNHEAEDLFYQSSLASWNYNTNITEENVQNMNNAGDKWSAFLKEQSTLAQMYPLQEIQNLTVKLQLQALQQNGSSVLSEDKSKRLNTILNTMSTIYSTGKVCNPDNPQECLLLEPGLNEIMANSLDYNERLWAWESWRSEVGKQLRPLYEEYVVLKNEMARANHYEDYGDYWRGDYEVNGVDGYDYSRGQLIEDVEHTFEEIKPLYEHLHAYVRAKLMNAYPSYISPIGCLPAHLLGDMWGRFWTNLYSLTVPFGQKPNIDVTDAMVDQAWDAQRIFKEAEKFFVSVGLPNMTQGFWENSMLTDPGNVQKAVCHPTAWDLGKGDFRILMCTKVTMDDFLTAHHEMGHIQYDMAYAAQPFLLRNGANEGFHEAVGEIMSLSAATPKHLKSIGLLSPDFQEDNETEINFLLKQALTIVGTLPFTYMLEKWRWMVFKGEIPKDQWMKKWWEMKREIVGVVEPVPHDETYCDPASLFHVSNDYSFIRYYTRTLYQFQFQEALCQAAKHEGPLHKCDISNSTEAGQKLFNMLRLGKSEPWTLALENVVGAKNMNVRPLLNYFEPLFTWLKDQNKNSFVGWSTDWSPYADQSIKVRISLKSALGDKAYEWNDNEMYLFRSSVAYAMRQYFLKVKNQMILFGEEDVRVANLKPRISFNFFVTAPKNVSDIIPRTEVEKAIRMSRSRINDAFRLNDNSLEFLGIQPTLGESKYGPPCPPCPAPEFLGGPSVFLFPPKPKDTLMISRTPEVTCVVVDVSQEDPEVQFNWYVDGVEVHNAKTKPREEQFNSTYRVVSVLTVLHQDWLNGKEYKCKVSNKGLPSSIEKTISKAKGQPREPQVYTLPPSQEEMTKNQVSLTCLVKGFYPSDIAVEWESNGQPENNYKTTPPVLDSDGSFFLYSRLTVDKSRWQEGNVFSCSVMHEALHNHYTQKSLSLSLGK

SEQ ID NO: 7 - protein, 942 aa, artificial
  ACE2 18-732 with IgG1 wt
QSTIEEQAKTFLDKFNHEAEDLFYQSSLASWNYNTNITEENVQNMNNAGDKWSAFLKEQSTLAQMYPLQEIQNLTVKLQLQALQQNGSSVLSEDKSKRLNTILNTMSTIYSTGKVCNPDNPQECLLLEPGLNEIMANSLDYNERLWAWESWRSEVGKQLRPLYEEYVVLKNEMARANHYEDYGDYWRGDYEVNGVDGYDYSRGQLIEDVEHTFEEIKPLYEHLHAYVRAKLMNAYPSYISPIGCLPAHLLGDMWGRFWTNLYSLTVPFGQKPNIDVTDAMVDQAWDAQRIFKEAEKFFVSVGLPNMTQGFWENSMLTDPGNVQKAVCHPTAWDLGKGDFRILMCTKVTMDDFLTAHHEMGHIQYDMAYAAQPFLLRNGANEGFHEAVGEIMSLSAATPKHLKSIGLLSPDFQEDNETEINFLLKQALTIVGTLPFTYMLEKWRWMVFKGEIPKDQWMKKWWEMKREIVGVVEPVPHDETYCDPASLFHVSNDYSFIRYYTRTLYQFQFQEALCQAAKHEGPLHKCDISNSTEAGQKLFNMLRLGKSEPWTLALENVVGAKNMNVRPLLNYFEPLFTWLKDQNKNSFVGWSTDWSPYADQSIKVRISLKSALGDKAYEWNDNEMYLFRSSVAYAMRQYFLKVKNQMILFGEEDVRVANLKPRISFNFFVTAPKNVSDIIPRTEVEKAIRMSRSRINDAFRLNDNSLEFLGIQPTLGDKTHTCPPCPAPELLGGPSVFLFPPKPKDTLMISRTPEVTCVVVDVSHEDPEVKFNWYVDGVEVHNAKTKPREEQYNSTYRVVSVLTVLHQDWLNGKEYKCKVSNKALPAPIEKTISKAKGQPREPQVYTLPPSRDELTKNQVSLTCLVKGFYPSDIAVEWESNGQPENNYKTTPPVLDSDGSFFLYSKLTVDKSRWQQGNVFSCSVMHEALHNHYTQKSLSLSPGK

SEQ ID NO: 8 - protein, 952 aa, artificial
  ACE2 18-740 with IgG4 wt
QSTIEEQAKTFLDKFNHEAEDLFYQSSLASWNYNTNITEENVQNMNNAGDKWSAFLKEQSTLAQMYPLQEIQNLTVKLQLQALQQNGSSVLSEDKSKRLNTILNTMSTIYSTGKVCNPDNPQECLLLEPGLNEIMANSLDYNERLWAWESWRSEVGKQLRPLYEEYVVLKNEMARANHYEDYGDYWRGDYEVNGVDGYDYSRGQLIEDVEHTFEEIKPLYEHLHAYVRAKLMNAYPSYISPIGCLPAHLLGDMWGRFWTNLYSLTVPFGQKPNIDVTDAMVDQAWDAQRIFKEAEKFFVSVGLPNMTQGFWENSMLTDPGNVQKAVCHPTAWDLGKGDFRILMCTKVTMDDFLTAHHEMGHIQYDMAYAAQPFLLRNGANEGFHEAVGEIMSLSAATPKHLKSIGLLSPDFQEDNETEINFLLKQALTIVGTLPFTYMLEKWRWMVFKGEIPKDQWMKKWWEMKREIVGVVEPVPHDETYCDPASLFHVSNDYSFIRYYTRTLYQFQFQEALCQAAKHEGPLHKCDISNSTEAGQKLFNMLRLGKSEPWTLALENVVGAKNMNVRPLLNYFEPLFTWLKDQNKNSFVGWSTDWSPYADQSIKVRISLKSALGDKAYEWNDNEMYLFRSSVAYAMRQYFLKVKNQMILFGEEDVRVANLKPRISFNFFVTAPKNVSDIIPRTEVEKAIRMSRSRINDAFRLNDNSLEFLGIQPTLGPPNQPPVSESKYGPPCPPCPAPEFLGGPSVFLFPPKPKDTLMISRTPEVTCVVVDVSQEDPEVQFNWYVDGVEVHNAKTKPREEQFNSTYRVVSVLTVLHQDWLNGKEYKCKVSNKGLPSSIEKTISKAKGQPREPQVYTLPPSQEEMTKNQVSLTCLVKGFYPSDIAVEWESNGQPENNYKTTPPVLDSDGSFFLYSRLTVDKSRWQEGNVFSCSVMHEALHNHYTQKSLSLSLGK

SEQ ID NO: 9 - protein, 950 aa, artificial
  ACE2 18-740 with IgG1 wt
QSTIEEQAKTFLDKFNHEAEDLFYQSSLASWNYNTNITEENVQNMNNAGDKWSAFLKEQSTLAQMYPLQEIQNLTVKLQLQALQQNGSSVLSEDKSKRLNTILNTMSTIYSTGKVCNPDNPQECLLLEPGLNEIMANSLDYNERLWAWESWRSEVGKQLRPLYEEYVVLKNEMARANHYEDYGDYWRGDYEVNGVDGYDYSRGQLIEDVEHTFEEIKPLYEHLHAYVRAKLMNAYPSYISPIGCLPAHLLGDMWGRFWTNLYSLTVPFGQKPNIDVTDAMVDQAWDAQRIFKEAEKFFVSVGLPNMTQGFWENSMLTDPGNVQKAVCHPTAWDLGKGDFRILMCTKVTMDDFLTAHHEMGHIQYDMAYAAQPFLLRNGANEGFHEAVGEIMSLSAATPKHLKSIGLLSPDFQEDNETEINFLLKQALTIVGTLPFTYMLEKWRWMVFKGEIPKDQWMKKWWEMKREIVGVVEPVPHDETYCDPASLFHVSNDYSFIRYYTRTLYQFQFQEALCQAAKHEGPLHKCDISNSTEAGQKLFNMLRLGKSEPWTLALENVVGAKNMNVRPLLNYFEPLFTWLKDQNKNSFVGWSTDWSPYADQSIKVRISLKSALGDKAYEWNDNEMYLFRSSVAYAMRQYFLKVKNQMILFGEEDVRVANLKPRISFNFFVTAPKNVSDIIPRTEVEKAIRMSRSRINDAFRLNDNSLEFLGIQPTLGPPNQPPVSDKTHTCPPCPAPELLGGPSVFLFPPKPKDTLMISRTPEVTCVVVDVSHEDPEVKFNWYVDGVEVHNAKTKPREEQYNSTYRVVSVLTVLHQDWLNGKEYKCKVSNKALPAPIEKTISKAKGQPREPQVYTLPPSRDELTKNQVSLTCLVKGFYPSDIAVEWESNGQPENNYKTTPPVLDSDGSFFLYSKLTVDKSRWQQGNVFSCSVMHEALHNHYTQKSLSLSPGK

SEQ ID NO: 10 - protein, 944 aa, artificial
  ACE2 18-732 H374N H378N with IgG4 wt
QSTIEEQAKTFLDKFNHEAEDLFYQSSLASWNYNTNITEENVQNMNNAGDKWSAFLKEQSTLAQMYPLQEIQNLTVKLQLQALQQNGSSVLSEDKSKRLNTILNTMSTIYSTGKVCNPDNPQECLLLEPGLNEIMANSLDYNERLWAWESWRSEVGKQLRPLYEEYVVLKNEMARANHYEDYGDYWRGDYEVNGVDGYDYSRGQLIEDVEHTFEEIKPLYEHLHAYVRAKLMNAYPSYISPIGCLPAHLLGDMWGRFWTNLYSLTVPFGQKPNIDVTDAMVDQAWDAQRIFKEAEKFFVSVGLPNMTQGFWENSMLTDPGNVQKAVCHPTAWDLGKGDFRILMCTKVTMDDFLTAHNEMGNIQYDMAYAAQPFLLRNGANEGFHEAVGEIMSLSAATPKHLKSIGLLSPDFQEDNETEINFLLKQALTIVGTLPFTYMLEKWRWMVFKGEIPKDQWMKKWWEMKREIVGVVEPVPHDETYCDPASLFHVSNDYSFIRYYTRTLYQFQFQEALCQAAKHEGPLHKCDISNSTEAGQKLFNMLRLGKSEPWTLALENVVGAKNMNVRPLLNYFEPLFTWLKDQNKNSFVGWSTDWSPYADQSIKVRISLKSALGDKAYEWNDNEMYLFRSSVAYAMRQYFLKVKNQMILFGEEDVRVANLKPRISFNFFVTAPKNVSDIIPRTEVEKAIRMSRSRINDAFRLNDNSLEFLGIQPTLGESKYGPPCPPCPAPEFLGGPSVFLFPPKPKDTLMISRTPEVTCVVVDVSQEDPEVQFNWYVDGVEVHNAKTKPREEQFNSTYRVVSVLTVLHQDWLNGKEYKCKVSNKGLPSSIEKTISKAKGQPREPQVYTLPPSQEEMTKNQVSLTCLVKGFYPSDIAVEWESNGQPENNYKTTPPVLDSDGSFFLYSRLTVDKSRWQEGNVFSCSVMHEALHNHYTQKSLSLSLGK

SEQ ID NO: 11 - protein, 942 aa, artificial
  ACE2 18-732 H374N H378N with IgG1 wt
QSTIEEQAKTFLDKFNHEAEDLFYQSSLASWNYNTNITEENVQNMNNAGDKWSAFLKEQSTLAQMYPLQEIQNLTVKLQLQALQQNGSSVLSEDKSKRLNTILNTMSTIYSTGKVCNPDNPQECLLLEPGLNEIMANSLDYNERLWAWESWRSEVGKQLRPLYEEYVVLKNEMARANHYEDYGDYWRGDYEVNGVDGYDYSRGQLIEDVEHTFEEIKPLYEHLHAYVRAKLMNAYPSYISPIGCLPAHLLGDMWGRFWTNLYSLTVPFGQKPNIDVTDAMVDQAWDAQRIFKEAEKFFVSVGLPNMTQGFWENSMLTDPGNVQKAVCHPTAWDLGKGDFRILMCTKVTMDDFLTAHNEMGNIQYDMAYAAQPFLLRNGANEGFHEAVGEIMSLSAATPKHLKSIGLLSPDFQEDNETEINFLLKQALTIVGTLPFTYMLEKWRWMVFKGEIPKDQWMKKWWEMKREIVGVVEPVPHDETYCDPASLFHVSNDYSFIRYYTRTLYQFQFQEALCQAAKHEGPLHKCDISNSTEAGQKLFNMLRLGKSEPWTLALENVVGAKNMNVRPLLNYFEPLFTWLKDQNKNSFVGWSTDWSPYADQSIKVRISLKSALGDKAYEWNDNEMYLFRSSVAYAMRQYFLKVKNQMILFGEEDVRVANLKPRISFNFFVTAPKNVSDIIPRTEVEKAIRMSRSRINDAFRLNDNSLEFLGIQPTLGDKTHTCPPCPAPELLGGPSVFLFPPKPKDTLMISRTPEVTCVVVDVSHEDPEVKFNWYVDGVEVHNAKTKPREEQYNSTYRVVSVLTVLHQDWLNGKEYKCKVSNKALPAPIEKTISKAKGQPREPQVYTLPPSRDELTKNQVSLTCLVKGFYPSDIAVEWESNGQPENNYKTTPPVLDSDGSFFLYSKLTVDKSRWQQGNVFSCSVMHEALHNHYTQKSLSLSPGK

SEQ ID NO: 12 - protein, 952 aa, artificial
  ACE2 18-740 H374N H378N with IgG4 wt
QSTIEEQAKTFLDKFNHEAEDLFYQSSLASWNYNTNITEENVQNMNNAGDKWSAFLKEQSTLAQMYPLQEIQNLTVKLQLQALQQNGSSVLSEDKSKRLNTILNTMSTIYSTGKVCNPDNPQECLLLEPGLNEIMANSLDYNERLWAWESWRSEVGKQLRPLYEEYVVLKNEMARANHYEDYGDYWRGDYEVNGVDGYDYSRGQLIEDVEHTFEEIKPLYEHLHAYVRAKLMNAYPSYISPIGCLPAHLLGDMWGRFWTNLYSLTVPFGQKPNIDVTDAMVDQAWDAQRIFKEAEKFFVSVGLPNMTQGFWENSMLTDPGNVQKAVCHPTAWDLGKGDFRILMCTKVTMDDFLTAHNEMGNIQYDMAYAAQPFLLRNGANEGFHEAVGEIMSLSAATPKHLKSIGLLSPDFQEDNETEINFLLKQALTIVGTLPFTYMLEKWRWMVFKGEIPKDQWMKKWWEMKREIVGVVEPVPHDETYCDPASLFHVSNDYSFIRYYTRTLYQFQFQEALCQAAKHEGPLHKCDISNSTEAGQKLFNMLRLGKSEPWTLALENVVGAKNMNVRPLLNYFEPLFTWLKDQNKNSFVGWSTDWSPYADQSIKVRISLKSALGDKAYEWNDNEMYLFRSSVAYAMRQYFLKVKNQMILFGEEDVRVANLKPRISFNFFVTAPKNVSDIIPRTEVEKAIRMSRSRINDAFRLNDNSLEFLGIQPTLGPPNQPPVSESKYGPPCPPCPAPEFLGGPSVFLFPPKPKDTLMISRTPEVTCVVVDVSQEDPEVQFNWYVDGVEVHNAKTKPREEQFNSTYRVVSVLTVLHQDWLNGKEYKCKVSNKGLPSSIEKTISKAKGQPREPQVYTLPPSQEEMTKNQVSLTCLVKGFYPSDIAVEWESNGQPENNYKTTPPVLDSDGSFFLYSRLTVDKSRWQEGNVFSCSVMHEALHNHYTQKSLSLSLGK

SEQ ID NO: 13 - protein, 950 aa, artificial
  ACE2 18-740 H374N H378N with IgG1 wt
QSTIEEQAKTFLDKFNHEAEDLFYQSSLASWNYNTNITEENVQNMNNAGDKWSAFLKEQSTLAQMYPLQEIQNLTVKLQLQALQQNGSSVLSEDKSKRLNTILNTMSTIYSTGKVCNPDNPQECLLLEPGLNEIMANSLDYNERLWAWESWRSEVGKQLRPLYEEYVVLKNEMARANHYEDYGDYWRGDYEVNGVDGYDYSRGQLIEDVEHTFEEIKPLYEHLHAYVRAKLMNAYPSYISPIGCLPAHLLGDMWGRFWTNLYSLTVPFGQKPNIDVTDAMVDQAWDAQRIFKEAEKFFVSVGLPNMTQGFWENSMLTDPGNVQKAVCHPTAWDLGKGDFRILMCTKVTMDDFLTAHNEMGNIQYDMAYAAQPFLLRNGANEGFHEAVGEIMSLSAATPKHLKSIGLLSPDFQEDNETEINFLLKQALTIVGTLPFTYMLEKWRWMVFKGEIPKDQWMKKWWEMKREIVGVVEPVPHDETYCDPASLFHVSNDYSFIRYYTRTLYQFQFQEALCQAAKHEGPLHKCDISNSTEAGQKLFNMLRLGKSEPWTLALENVVGAKNMNVRPLLNYFEPLFTWLKDQNKNSFVGWSTDWSPYADQSIKVRISLKSALGDKAYEWNDNEMYLFRSSVAYAMRQYFLKVKNQMILFGEEDVRVANLKPRISFNFFVTAPKNVSDIIPRTEVEKAIRMSRSRINDAFRLNDNSLEFLGIQPTLGPPNQPPVSDKTHTCPPCPAPELLGGPSVFLFPPKPKDTLMISRTPEVTCVVVDVSHEDPEVKFNWYVDGVEVHNAKTKPREEQYNSTYRVVSVLTVLHQDWLNGKEYKCKVSNKALPAPIEKTISKAKGQPREPQVYTLPPSRDELTKNQVSLTCLVKGFYPSDIAVEWESNGQPENNYKTTPPVLDSDGSFFLYSKLTVDKSRWQQGNVFSCSVMHEALHNHYTQKSLSLSPGK

SEQ ID NO: 14 - protein, 11 aa, artificial
  linker sequence
GGGSGGGSSSG

SEQ ID NO: 15 - protein, 18 aa, Homo sapiens
MKWVTFISLLFLFSSAYS

SEQ ID NO: 16 - protein, 588 aa, Homo sapiens
QSTIEEQAKTFLDKFNHEAEDLFYQSSLASWNYNTNITEENVQNMNNAGDKWSAFLKEQSTLAQMYPLQEIQNLTVKLQLQALQQNGSSVLSEDKSKRLNTILNTMSTIYSTGKVCNPDNPQECLLLEPGLNEIMANSLDYNERLWAWESWRSEVGKQLRPLYEEYVVLKNEMARANHYEDYGDYWRGDYEVNGVDGYDYSRGQLIEDVEHTFEEIKPLYEHLHAYVRAKLMNAYPSYISPIGCLPAHLLGDMWGRFWTNLYSLTVPFGQKPNIDVTDAMVDQAWDAQRIFKEAEKFFVSVGLPNMTQGFWENSMLTDPGNVQKAVCHPTAWDLGKGDFRILMCTKVTMDDFLTAHHEMGHIQYDMAYAAQPFLLRNGANEGFHEAVGEIMSLSAATPKHLKSIGLLSPDFQEDNETEINFLLKQALTIVGTLPFTYMLEKWRWMVFKGEIPKDQWMKKWWEMKREIVGVVEPVPHDETYCDPASLFHVSNDYSFIRYYTRTLYQFQFQEALCQAAKHEGPLHKCDISNSTEAGQKLFNMLRLGKSEPWTLALENVVGAKNMNVRPLLNYFEPLFTWLKDQNKNSFVG

SEQ ID NO: 17 - protein, 1273 aa, SARS-CoV2
MFVFLVLLPLVSSQCVNLTTRTQLPPAYTNSFTRGVYYPDKVFRSSVLHSTQDLFLPFFSNVTWFHAIHVSGTNGTKRFDNPVLPFNDGVYFASTEKSNIIRGWIFGTTLDSKTQSLLIVNNATNVVIKVCEFQFCNDPFLGVYYHKNNKSWMESEFRVYSSANNCTFEYVSQPFLMDLEGKQGNFKNLREFVFKNIDGYFKIYSKHTPINLVRDLPQGFSALEPLVDLPIGINITRFQTLLALHRSYLTPGDSSSGWTAGAAAYYVGYLQPRTFLLKYNENGTITDAVDCALDPLSETKCTLKSFTVEKGIYQTSNFRVQPTESIVRFPNITNLCPFGEVFNATRFASVYAWNRKRISNCVADYSVLYNSASFSTFKCYGVSPTKLNDLCFTNVYADSFVIRGDEVRQIAPGQTGKIADYNYKLPDDFTGCVIAWNSNNLDSKVGGNYNYLYRLFRKSNLKPFERDISTEIYQAGSTPCNGVEGFNCYFPLQSYGFQPTNGVGYQPYRVVVLSFELLHAPATVCGPKKSTNLVKNKCVNFNFNGLTGTGVLTESNKKFLPFQQFGRDIADTTDAVRDPQTLEILDITPCSFGGVSVITPGTNTSNQVAVLYQDVNCTEVPVAIHADQLTPTWRVYSTGSNVFQTRAGCLIGAEHVNNSYECDIPIGAGICASYQTQTNSPRRARSVASQSIIAYTMSLGAENSVAYSNNSIAIPTNFTISVTTEILPVSMTKTSVDCTMYICGDSTECSNLLLQYGSFCTQLNRALTGIAVEQDKNTQEVFAQVKQIYKTPPIKDFGGFNFSQILPDPSKPSKRSFIEDLLFNKVTLADAGFIKQYGDCLGDIAARDLICAQKFNGLTVLPPLLTDEMIAQYTSALLAGTITSGWTFGAGAALQIPFAMQMAYRFNGIGVTQNVLYENQKLIANQFNSAIGKIQDSLSSTASALGKLQDVVNQNAQALNTLVKQLSSNFGAISSVLNDILSRLDKVEAEVQIDRLITGRLQSLQTYVTQQLIRAAEIRASANLAATKMSECVLGQSKRVDFCGKGYHLMSFPQSAPHGVVFLHVTYVPAQEKNFTTAPAICHDGKAHFPREGVFVSNGTHWFVTQRNFYEPQIITTDNTFVSGNCDVVIGIVNNTVYDPLQPELDSFKEELDKYFKNHTSPDVDLGDISGINASVVNIQKEIDRLNEVAKNLNESLIDLQELGKYEQYIKWPWYIWLGFIAGLIAIVMVTIMLCCMTSCCSCLKGCCSCGSCCKFDEDDSEPVLKGVKLHYT

SEQ ID NO: 18 - protein, 13 aa, human
ESKYGPPCPPCPA

SEQ ID NO: 19 - protein, 11 aa, human
DKTHTCPPCPA

SEQ ID NO: 20 - protein, 216 aa, artificial
  Fc part of IgG4 with YTE mutation
PEFLGGPSVFLFPPKPKDTLYITREPEVTCVVVDVSQEDPEVQFNWYVDGVEVHNAKTKPREEQFNSTYRVVSVLTVLHQDWLNGKEYKCKVSNKGLPSSIEKTISKAKGQPREPQVYTLPPSQEEMTKNQVSLTCLVKGFYPSDIAVEWESNGQPENNYKTTPPVLDSDGSFFLYSRLTVDKSRWQEGNVFSCSVMHEALHNHYTQKSLSLSLGK

SEQ ID NO: 21 - protein, 216 aa, artificial
  IgG4 T256D T307Q
PEFLGGPSVFLFPPKPKDTLMISRDPEVTCVVVDVSQEDPEVQFNWYVDGVEVHNAKTKPREEQFNSTYRVVSVLQVLHQDWLNGKEYKCKVSNKGLPSSIEKTISKAKGQPREPQVYTLPPSQEEMTKNQVSLTCLVKGFYPSDIAVEWESNGQPENNYKTTPPVLDSDGSFFLYSRLTVDKSRWQEGNVFSCSVMHEALHNHYTQKSLSLSLGK

SEQ ID NO: 22 - protein, 216 aa, artificial
  IgG1 mutant
PELLGGPSVFLFPPKPKDTLYITREPEVTCVVVDVSHEDPEVKFNWYVDGVEVHNAKTKPREEQYNSTYRVVSVLTVLHQDWLNGKEYKCKVSNKALPAPIEKTISKAKGQPREPQVYTLPPSRDELTKNQVSLTCLVKGFYPSDIAVEWESNGQPENNYKTTPPVLDSDGSFFLYSKLTVDKSRWQQGNVFSCSVMHEALHNHYTQKSLSLSPGK

SEQ ID NO: 23 - protein, 216 aa, artificial
  IgG1 T256D T307Q
PELLGGPSVFLFPPKPKDTLMISRDPEVTCVVVDVSHEDPEVKFNWYVDGVEVHNAKTKPREEQYNSTYRVVSVLQVLHQDWLNGKEYKCKVSNKALPAPIEKTISKAKGQPREPQVYTLPPSRDELTKNQVSLTCLVKGFYPSDIAVEWESNGQPENNYKTTPPVLDSDGSFFLYSKLTVDKSRWQQGNVFSCSVMHEALHNHYTQKSLSLSPGK

SEQ ID NO: 24 - protein, 715 aa, artificial
  ACE2 18-732 H374N H378N
QSTIEEQAKTFLDKFNHEAEDLFYQSSLASWNYNTNITEENVQNMNNAGDKWSAFLKEQSTLAQMYPLQEIQNLTVKLQLQALQQNGSSVLSEDKSKRLNTILNTMSTIYSTGKVCNPDNPQECLLLEPGLNEIMANSLDYNERLWAWESWRSEVGKQLRPLYEEYVVLKNEMARANHYEDYGDYWRGDYEVNGVDGYDYSRGQLIEDVEHTFEEIKPLYEHLHAYVRAKLMNAYPSYISPIGCLPAHLLGDMWGRFWTNLYSLTVPFGQKPNIDVTDAMVDQAWDAQRIFKEAEKFFVSVGLPNMTQGFWENSMLTDPGNVQKAVCHPTAWDLGKGDFRILMCTKVTMDDFLTAHNEMGNIQYDMAYAAQPFLLRNGANEGFHEAVGEIMSLSAATPKHLKSIGLLSPDFQEDNETEINFLLKQALTIVGTLPFTYMLEKWRWMVFKGEIPKDQWMKKWWEMKREIVGVVEPVPHDETYCDPASLFHVSNDYSFIRYYTRTLYQFQFQEALCQAAKHEGPLHKCDISNSTEAGQKLFNMLRLGKSEPWTLALENVVGAKNMNVRPLLNYFEPLFTWLKDQNKNSFVGWSTDWSPYADQSIKVRISLKSALGDKAYEWNDNEMYLFRSSVAYAMRQYFLKVKNQMILFGEEDVRVANLKPRISFNFFVTAPKNVSDIIPRTEVEKAIRMSRSRINDAFRLNDNSLEFLGIQPTLG

SEQ ID NO: 25 - protein, 723 aa, artificial
  ACE2 18-740 H374N H378N
QSTIEEQAKTFLDKFNHEAEDLFYQSSLASWNYNTNITEENVQNMNNAGDKWSAFLKEQSTLAQMYPLQEIQNLTVKLQLQALQQNGSSVLSEDKSKRLNTILNTMSTIYSTGKVCNPDNPQECLLLEPGLNEIMANSLDYNERLWAWESWRSEVGKQLRPLYEEYVVLKNEMARANHYEDYGDYWRGDYEVNGVDGYDYSRGQLIEDVEHTFEEIKPLYEHLHAYVRAKLMNAYPSYISPIGCLPAHLLGDMWGRFWTNLYSLTVPFGQKPNIDVTDAMVDQAWDAQRIFKEAEKFFVSVGLPNMTQGFWENSMLTDPGNVQKAVCHPTAWDLGKGDFRILMCTKVTMDDFLTAHNEMGNIQYDMAYAAQPFLLRNGANEGFHEAVGEIMSLSAATPKHLKSIGLLSPDFQEDNETEINFLLKQALTIVGTLPFTYMLEKWRWMVFKGEIPKDQWMKKWWEMKREIVGVVEPVPHDETYCDPASLFHVSNDYSFIRYYTRTLYQFQFQEALCQAAKHEGPLHKCDISNSTEAGQKLFNMLRLGKSEPWTLALENVVGAKNMNVRPLLNYFEPLFTWLKDQNKNSFVGWSTDWSPYADQSIKVRISLKSALGDKAYEWNDNEMYLFRSSVAYAMRQYFLKVKNQMILFGEEDVRVANLKPRISFNFFVTAPKNVSDIIPRTEVEKAIRMSRSRINDAFRLNDNSLEFLGIQPTLGPPNQPPVS

SEQ ID NO: 26 - protein, 944 aa, artificial
  ACE2 18-732 with IgG4 YTE
QSTIEEQAKTFLDKFNHEAEDLFYQSSLASWNYNTNITEENVQNMNNAGDKWSAFLKEQSTLAQMYPLQEIQNLTVKLQLQALQQNGSSVLSEDKSKRLNTILNTMSTIYSTGKVCNPDNPQECLLLEPGLNEIMANSLDYNERLWAWESWRSEVGKQLRPLYEEYVVLKNEMARANHYEDYGDYWRGDYEVNGVDGYDYSRGQLIEDVEHTFEEIKPLYEHLHAYVRAKLMNAYPSYISPIGCLPAHLLGDMWGRFWTNLYSLTVPFGQKPNIDVTDAMVDQAWDAQRIFKEAEKFFVSVGLPNMTQGFWENSMLTDPGNVQKAVCHPTAWDLGKGDFRILMCTKVTMDDFLTAHHEMGHIQYDMAYAAQPFLLRNGANEGFHEAVGEIMSLSAATPKHLKSIGLLSPDFQEDNETEINFLLKQALTIVGTLPFTYMLEKWRWMVFKGEIPKDQWMKKWWEMKREIVGVVEPVPHDETYCDPASLFHVSNDYSFIRYYTRTLYQFQFQEALCQAAKHEGPLHKCDISNSTEAGQKLFNMLRLGKSEPWTLALENVVGAKNMNVRPLLNYFEPLFTWLKDQNKNSFVGWSTDWSPYADQSIKVRISLKSALGDKAYEWNDNEMYLFRSSVAYAMRQYFLKVKNQMILFGEEDVRVANLKPRISFNFFVTAPKNVSDIIPRTEVEKAIRMSRSRINDAFRLNDNSLEFLGIQPTLGESKYGPPCPPCPAPEFLGGPSVFLFPPKPKDTLYITREPEVTCVVVDVSQEDPEVQFNWYVDGVEVHNAKTKPREEQFNSTYRVVSVLTVLHQDWLNGKEYKCKVSNKGLPSSIEKTISKAKGQPREPQVYTLPPSQEEMTKNQVSLTCLVKGFYPSDIAVEWESNGQPENNYKTTPPVLDSDGSFFLYSRLTVDKSRWQEGNVFSCSVMHEALHNHYTQKSLSLSLGK

SEQ ID NO: 27 - protein, 942 aa, artificial
  ACE2 18-732 with IgG1 YTE
QSTIEEQAKTFLDKFNHEAEDLFYQSSLASWNYNTNITEENVQNMNNAGDKWSAFLKEQSTLAQMYPLQEIQNLTVKLQLQALQQNGSSVLSEDKSKRLNTILNTMSTIYSTGKVCNPDNPQECLLLEPGLNEIMANSLDYNERLWAWESWRSEVGKQLRPLYEEYVVLKNEMARANHYEDYGDYWRGDYEVNGVDGYDYSRGQLIEDVEHTFEEIKPLYEHLHAYVRAKLMNAYPSYISPIGCLPAHLLGDMWGRFWTNLYSLTVPFGQKPNIDVTDAMVDQAWDAQRIFKEAEKFFVSVGLPNMTQGFWENSMLTDPGNVQKAVCHPTAWDLGKGDFRILMCTKVTMDDFLTAHHEMGHIQYDMAYAAQPFLLRNGANEGFHEAVGEIMSLSAATPKHLKSIGLLSPDFQEDNETEINFLLKQALTIVGTLPFTYMLEKWRWMVFKGEIPKDQWMKKWWEMKREIVGVVEPVPHDETYCDPASLFHVSNDYSFIRYYTRTLYQFQFQEALCQAAKHEGPLHKCDISNSTEAGQKLFNMLRLGKSEPWTLALENVVGAKNMNVRPLLNYFEPLFTWLKDQNKNSFVGWSTDWSPYADQSIKVRISLKSALGDKAYEWNDNEMYLFRSSVAYAMRQYFLKVKNQMILFGEEDVRVANLKPRISFNFFVTAPKNVSDIIPRTEVEKAIRMSRSRINDAFRLNDNSLEFLGIQPTLGDKTHTCPPCPAPELLGGPSVFLFPPKPKDTLYITREPEVTCVVVDVSHEDPEVKFNWYVDGVEVHNAKTKPREEQYNSTYRVVSVLTVLHQDWLNGKEYKCKVSNKALPAPIEKTISKAKGQPREPQVYTLPPSRDELTKNQVSLTCLVKGFYPSDIAVEWESNGQPENNYKTTPPVLDSDGSFFLYSKLTVDKSRWQQGNVFSCSVMHEALHNHYTQKSLSLSPGK

SEQ ID NO: 28 - protein, 944 aa, artificial
  ACE2 18-732 with IgG4 T256D T307Q
QSTIEEQAKTFLDKFNHEAEDLFYQSSLASWNYNTNITEENVQNMNNAGDKWSAFLKEQSTLAQMYPLQEIQNLTVKLQLQALQQNGSSVLSEDKSKRLNTILNTMSTIYSTGKVCNPDNPQECLLLEPGLNEIMANSLDYNERLWAWESWRSEVGKQLRPLYEEYVVLKNEMARANHYEDYGDYWRGDYEVNGVDGYDYSRGQLIEDVEHTFEEIKPLYEHLHAYVRAKLMNAYPSYISPIGCLPAHLLGDMWGRFWTNLYSLTVPFGQKPNIDVTDAMVDQAWDAQRIFKEAEKFFVSVGLPNMTQGFWENSMLTDPGNVQKAVCHPTAWDLGKGDFRILMCTKVTMDDFLTAHHEMGHIQYDMAYAAQPFLLRNGANEGFHEAVGEIMSLSAATPKHLKSIGLLSPDFQEDNETEINFLLKQALTIVGTLPFTYMLEKWRWMVFKGEIPKDQWMKKWWEMKREIVGVVEPVPHDETYCDPASLFHVSNDYSFIRYYTRTLYQFQFQEALCQAAKHEGPLHKCDISNSTEAGQKLFNMLRLGKSEPWTLALENVVGAKNMNVRPLLNYFEPLFTWLKDQNKNSFVGWSTDWSPYADQSIKVRISLKSALGDKAYEWNDNEMYLFRSSVAYAMRQYFLKVKNQMILFGEEDVRVANLKPRISFNFFVTAPKNVSDIIPRTEVEKAIRMSRSRINDAFRLNDNSLEFLGIQPTLGESKYGPPCPPCPAPEFLGGPSVFLFPPKPKDTLMISRDPEVTCVVVDVSQEDPEVQFNWYVDGVEVHNAKTKPREEQFNSTYRVVSVLQVLHQDWLNGKEYKCKVSNKGLPSSIEKTISKAKGQPREPQVYTLPPSQEEMTKNQVSLTCLVKGFYPSDIAVEWESNGQPENNYKTTPPVLDSDGSFFLYSRLTVDKSRWQEGNVFSCSVMHEALHNHYTQKSLSLSLGK

SEQ ID NO: 29 - protein, 942 aa, artificial
  ACE2 18-732 with IgG1 T256D T307Q
QSTIEEQAKTFLDKFNHEAEDLFYQSSLASWNYNTNITEENVQNMNNAGDKWSAFLKEQSTLAQMYPLQEIQNLTVKLQLQALQQNGSSVLSEDKSKRLNTILNTMSTIYSTGKVCNPDNPQECLLLEPGLNEIMANSLDYNERLWAWESWRSEVGKQLRPLYEEYVVLKNEMARANHYEDYGDYWRGDYEVNGVDGYDYSRGQLIEDVEHTFEEIKPLYEHLHAYVRAKLMNAYPSYISPIGCLPAHLLGDMWGRFWTNLYSLTVPFGQKPNIDVTDAMVDQAWDAQRIFKEAEKFFVSVGLPNMTQGFWENSMLTDPGNVQKAVCHPTAWDLGKGDFRILMCTKVTMDDFLTAHHEMGHIQYDMAYAAQPFLLRNGANEGFHEAVGEIMSLSAATPKHLKSIGLLSPDFQEDNETEINFLLKQALTIVGTLPFTYMLEKWRWMVFKGEIPKDQWMKKWWEMKREIVGVVEPVPHDETYCDPASLFHVSNDYSFIRYYTRTLYQFQFQEALCQAAKHEGPLHKCDISNSTEAGQKLFNMLRLGKSEPWTLALENVVGAKNMNVRPLLNYFEPLFTWLKDQNKNSFVGWSTDWSPYADQSIKVRISLKSALGDKAYEWNDNEMYLFRSSVAYAMRQYFLKVKNQMILFGEEDVRVANLKPRISFNFFVTAPKNVSDIIPRTEVEKAIRMSRSRINDAFRLNDNSLEFLGIQPTLGDKTHTCPPCPAPELLGGPSVFLFPPKPKDTLMISRDPEVTCVVVDVSHEDPEVKFNWYVDGVEVHNAKTKPREEQYNSTYRVVSVLQVLHQDWLNGKEYKCKVSNKALPAPIEKTISKAKGQPREPQVYTLPPSRDELTKNQVSLTCLVKGFYPSDIAVEWESNGQPENNYKTTPPVLDSDGSFFLYSKLTVDKSRWQQGNVFSCSVMHEALHNHYTQKSLSLSPGK

SEQ ID NO: 30 - protein, 952 aa, artificial
  ACE2 18-740 with IgG4 YTE
QSTIEEQAKTFLDKFNHEAEDLFYQSSLASWNYNTNITEENVQNMNNAGDKWSAFLKEQSTLAQMYPLQEIQNLTVKLQLQALQQNGSSVLSEDKSKRLNTILNTMSTIYSTGKVCNPDNPQECLLLEPGLNEIMANSLDYNERLWAWESWRSEVGKQLRPLYEEYVVLKNEMARANHYEDYGDYWRGDYEVNGVDGYDYSRGQLIEDVEHTFEEIKPLYEHLHAYVRAKLMNAYPSYISPIGCLPAHLLGDMWGRFWTNLYSLTVPFGQKPNIDVTDAMVDQAWDAQRIFKEAEKFFVSVGLPNMTQGFWENSMLTDPGNVQKAVCHPTAWDLGKGDFRILMCTKVTMDDFLTAHHEMGHIQYDMAYAAQPFLLRNGANEGFHEAVGEIMSLSAATPKHLKSIGLLSPDFQEDNETEINFLLKQALTIVGTLPFTYMLEKWRWMVFKGEIPKDQWMKKWWEMKREIVGVVEPVPHDETYCDPASLFHVSNDYSFIRYYTRTLYQFQFQEALCQAAKHEGPLHKCDISNSTEAGQKLFNMLRLGKSEPWTLALENVVGAKNMNVRPLLNYFEPLFTWLKDQNKNSFVGWSTDWSPYADQSIKVRISLKSALGDKAYEWNDNEMYLFRSSVAYAMRQYFLKVKNQMILFGEEDVRVANLKPRISFNFFVTAPKNVSDIIPRTEVEKAIRMSRSRINDAFRLNDNSLEFLGIQPTLGPPNQPPVSESKYGPPCPPCPAPEFLGGPSVFLFPPKPKDTLYITREPEVTCVVVDVSQEDPEVQFNWYVDGVEVHNAKTKPREEQFNSTYRVVSVLTVLHQDWLNGKEYKCKVSNKGLPSSIEKTISKAKGQPREPQVYTLPPSQEEMTKNQVSLTCLVKGFYPSDIAVEWESNGQPENNYKTTPPVLDSDGSFFLYSRLTVDKSRWQEGNVFSCSVMHEALHNHYTQKSLSLSLGK

SEQ ID NO: 31 - protein, 950 aa, artificial
  ACE2 18-740 with IgG1 YTE
QSTIEEQAKTFLDKFNHEAEDLFYQSSLASWNYNTNITEENVQNMNNAGDKWSAFLKEQSTLAQMYPLQEIQNLTVKLQLQALQQNGSSVLSEDKSKRLNTILNTMSTIYSTGKVCNPDNPQECLLLEPGLNEIMANSLDYNERLWAWESWRSEVGKQLRPLYEEYVVLKNEMARANHYEDYGDYWRGDYEVNGVDGYDYSRGQLIEDVEHTFEEIKPLYEHLHAYVRAKLMNAYPSYISPIGCLPAHLLGDMWGRFWTNLYSLTVPFGQKPNIDVTDAMVDQAWDAQRIFKEAEKFFVSVGLPNMTQGFWENSMLTDPGNVQKAVCHPTAWDLGKGDFRILMCTKVTMDDFLTAHHEMGHIQYDMAYAAQPFLLRNGANEGFHEAVGEIMSLSAATPKHLKSIGLLSPDFQEDNETEINFLLKQALTIVGTLPFTYMLEKWRWMVFKGEIPKDQWMKKWWEMKREIVGVVEPVPHDETYCDPASLFHVSNDYSFIRYYTRTLYQFQFQEALCQAAKHEGPLHKCDISNSTEAGQKLFNMLRLGKSEPWTLALENVVGAKNMNVRPLLNYFEPLFTWLKDQNKNSFVGWSTDWSPYADQSIKVRISLKSALGDKAYEWNDNEMYLFRSSVAYAMRQYFLKVKNQMILFGEEDVRVANLKPRISFNFFVTAPKNVSDIIPRTEVEKAIRMSRSRINDAFRLNDNSLEFLGIQPTLGPPNQPPVSDKTHTCPPCPAPELLGGPSVFLFPPKPKDTLYITREPEVTCVVVDVSHEDPEVKFNWYVDGVEVHNAKTKPREEQYNSTYRVVSVLTVLHQDWLNGKEYKCKVSNKALPAPIEKTISKAKGQPREPQVYTLPPSRDELTKNQVSLTCLVKGFYPSDIAVEWESNGQPENNYKTTPPVLDSDGSFFLYSKLTVDKSRWQQGNVFSCSVMHEALHNHYTQKSLSLSPGK

SEQ ID NO: 32 - protein, 952 aa, artificial
  ACE2 18-740 with IgG4 T256D T307Q
QSTIEEQAKTFLDKFNHEAEDLFYQSSLASWNYNTNITEENVQNMNNAGDKWSAFLKEQSTLAQMYPLQEIQNLTVKLQLQALQQNGSSVLSEDKSKRLNTILNTMSTIYSTGKVCNPDNPQECLLLEPGLNEIMANSLDYNERLWAWESWRSEVGKQLRPLYEEYVVLKNEMARANHYEDYGDYWRGDYEVNGVDGYDYSRGQLIEDVEHTFEEIKPLYEHLHAYVRAKLMNAYPSYISPIGCLPAHLLGDMWGRFWTNLYSLTVPFGQKPNIDVTDAMVDQAWDAQRIFKEAEKFFVSVGLPNMTQGFWENSMLTDPGNVQKAVCHPTAWDLGKGDFRILMCTKVTMDDFLTAHHEMGHIQYDMAYAAQPFLLRNGANEGFHEAVGEIMSLSAATPKHLKSIGLLSPDFQEDNETEINFLLKQALTIVGTLPFTYMLEKWRWMVFKGEIPKDQWMKKWWEMKREIVGVVEPVPHDETYCDPASLFHVSNDYSFIRYYTRTLYQFQFQEALCQAAKHEGPLHKCDISNSTEAGQKLFNMLRLGKSEPWTLALENVVGAKNMNVRPLLNYFEPLFTWLKDQNKNSFVGWSTDWSPYADQSIKVRISLKSALGDKAYEWNDNEMYLFRSSVAYAMRQYFLKVKNQMILFGEEDVRVANLKPRISFNFFVTAPKNVSDIIPRTEVEKAIRMSRSRINDAFRLNDNSLEFLGIQPTLGPPNQPPVSESKYGPPCPPCPAPEFLGGPSVFLFPPKPKDTLMISRDPEVTCVVVDVSQEDPEVQFNWYVDGVEVHNAKTKPREEQFNSTYRVVSVLQVLHQDWLNGKEYKCKVSNKGLPSSIEKTISKAKGQPREPQVYTLPPSQEEMTKNQVSLTCLVKGFYPSDIAVEWESNGQPENNYKTTPPVLDSDGSFFLYSRLTVDKSRWQEGNVFSCSVMHEALHNHYTQKSLSLSLGK

SEQ ID NO: 33 - protein, 950 aa, artificial
  ACE2 18-740 with IgG1 T256D T307Q
QSTIEEQAKTFLDKFNHEAEDLFYQSSLASWNYNTNITEENVQNMNNAGDKWSAFLKEQSTLAQMYPLQEIQNLTVKLQLQALQQNGSSVLSEDKSKRLNTILNTMSTIYSTGKVCNPDNPQECLLLEPGLNEIMANSLDYNERLWAWESWRSEVGKQLRPLYEEYVVLKNEMARANHYEDYGDYWRGDYEVNGVDGYDYSRGQLIEDVEHTFEEIKPLYEHLHAYVRAKLMNAYPSYISPIGCLPAHLLGDMWGRFWTNLYSLTVPFGQKPNIDVTDAMVDQAWDAQRIFKEAEKFFVSVGLPNMTQGFWENSMLTDPGNVQKAVCHPTAWDLGKGDFRILMCTKVTMDDFLTAHHEMGHIQYDMAYAAQPFLLRNGANEGFHEAVGEIMSLSAATPKHLKSIGLLSPDFQEDNETEINFLLKQALTIVGTLPFTYMLEKWRWMVFKGEIPKDQWMKKWWEMKREIVGVVEPVPHDETYCDPASLFHVSNDYSFIRYYTRTLYQFQFQEALCQAAKHEGPLHKCDISNSTEAGQKLFNMLRLGKSEPWTLALENVVGAKNMNVRPLLNYFEPLFTWLKDQNKNSFVGWSTDWSPYADQSIKVRISLKSALGDKAYEWNDNEMYLFRSSVAYAMRQYFLKVKNQMILFGEEDVRVANLKPRISFNFFVTAPKNVSDIIPRTEVEKAIRMSRSRINDAFRLNDNSLEFLGIQPTLGPPNQPPVSDKTHTCPPCPAPELLGGPSVFLFPPKPKDTLMISRDPEVTCVVVDVSHEDPEVKFNWYVDGVEVHNAKTKPREEQYNSTYRVVSVLQVLHQDWLNGKEYKCKVSNKALPAPIEKTISKAKGQPREPQVYTLPPSRDELTKNQVSLTCLVKGFYPSDIAVEWESNGQPENNYKTTPPVLDSDGSFFLYSKLTVDKSRWQQGNVFSCSVMHEALHNHYTQKSLSLSPGK

SEQ ID NO: 34 - protein, 944 aa, artificial
  fusion protein of ACE2 18-732 H374N H378N with IgG4 YTE
QSTIEEQAKTFLDKFNHEAEDLFYQSSLASWNYNTNITEENVQNMNNAGDKWSAFLKEQSTLAQMYPLQEIQNLTVKLQLQALQQNGSSVLSEDKSKRLNTILNTMSTIYSTGKVCNPDNPQECLLLEPGLNEIMANSLDYNERLWAWESWRSEVGKQLRPLYEEYVVLKNEMARANHYEDYGDYWRGDYEVNGVDGYDYSRGQLIEDVEHTFEEIKPLYEHLHAYVRAKLMNAYPSYISPIGCLPAHLLGDMWGRFWTNLYSLTVPFGQKPNIDVTDAMVDQAWDAQRIFKEAEKFFVSVGLPNMTQGFWENSMLTDPGNVQKAVCHPTAWDLGKGDFRILMCTKVTMDDFLTAHNEMGNIQYDMAYAAQPFLLRNGANEGFHEAVGEIMSLSAATPKHLKSIGLLSPDFQEDNETEINFLLKQALTIVGTLPFTYMLEKWRWMVFKGEIPKDQWMKKWWEMKREIVGVVEPVPHDETYCDPASLFHVSNDYSFIRYYTRTLYQFQFQEALCQAAKHEGPLHKCDISNSTEAGQKLFNMLRLGKSEPWTLALENVVGAKNMNVRPLLNYFEPLFTWLKDQNKNSFVGWSTDWSPYADQSIKVRISLKSALGDKAYEWNDNEMYLFRSSVAYAMRQYFLKVKNQMILFGEEDVRVANLKPRISFNFFVTAPKNVSDIIPRTEVEKAIRMSRSRINDAFRLNDNSLEFLGIQPTLGESKYGPPCPPCPAPEFLGGPSVFLFPPKPKDTLYITREPEVTCVVVDVSQEDPEVQFNWYVDGVEVHNAKTKPREEQFNSTYRVVSVLTVLHQDWLNGKEYKCKVSNKGLPSSIEKTISKAKGQPREPQVYTLPPSQEEMTKNQVSLTCLVKGFYPSDIAVEWESNGQPENNYKTTPPVLDSDGSFFLYSRLTVDKSRWQEGNVFSCSVMHEALHNHYTQKSLSLSLGK

SEQ ID NO: 35 - protein, 942 aa, artificial
  ACE2 18-732 (H374N+H378N) with IgG1 YTE
QSTIEEQAKTFLDKFNHEAEDLFYQSSLASWNYNTNITEENVQNMNNAGDKWSAFLKEQSTLAQMYPLQEIQNLTVKLQLQALQQNGSSVLSEDKSKRLNTILNTMSTIYSTGKVCNPDNPQECLLLEPGLNEIMANSLDYNERLWAWESWRSEVGKQLRPLYEEYVVLKNEMARANHYEDYGDYWRGDYEVNGVDGYDYSRGQLIEDVEHTFEEIKPLYEHLHAYVRAKLMNAYPSYISPIGCLPAHLLGDMWGRFWTNLYSLTVPFGQKPNIDVTDAMVDQAWDAQRIFKEAEKFFVSVGLPNMTQGFWENSMLTDPGNVQKAVCHPTAWDLGKGDFRILMCTKVTMDDFLTAHNEMGNIQYDMAYAAQPFLLRNGANEGFHEAVGEIMSLSAATPKHLKSIGLLSPDFQEDNETEINFLLKQALTIVGTLPFTYMLEKWRWMVFKGEIPKDQWMKKWWEMKREIVGVVEPVPHDETYCDPASLFHVSNDYSFIRYYTRTLYQFQFQEALCQAAKHEGPLHKCDISNSTEAGQKLFNMLRLGKSEPWTLALENVVGAKNMNVRPLLNYFEPLFTWLKDQNKNSFVGWSTDWSPYADQSIKVRISLKSALGDKAYEWNDNEMYLFRSSVAYAMRQYFLKVKNQMILFGEEDVRVANLKPRISFNFFVTAPKNVSDIIPRTEVEKAIRMSRSRINDAFRLNDNSLEFLGIQPTLGDKTHTCPPCPAPELLGGPSVFLFPPKPKDTLYITREPEVTCVVVDVSHEDPEVKFNWYVDGVEVHNAKTKPREEQYNSTYRVVSVLTVLHQDWLNGKEYKCKVSNKALPAPIEKTISKAKGQPREPQVYTLPPSRDELTKNQVSLTCLVKGFYPSDIAVEWESNGQPENNYKTTPPVLDSDGSFFLYSKLTVDKSRWQQGNVFSCSVMHEALHNHYTQKSLSLSPGK

SEQ ID NO: 36 - protein, 944 aa, artificial
  ACE2 18-732 H374N H378N with IgG4 T256D T307Q
QSTIEEQAKTFLDKFNHEAEDLFYQSSLASWNYNTNITEENVQNMNNAGDKWSAFLKEQSTLAQMYPLQEIQNLTVKLQLQALQQNGSSVLSEDKSKRLNTILNTMSTIYSTGKVCNPDNPQECLLLEPGLNEIMANSLDYNERLWAWESWRSEVGKQLRPLYEEYVVLKNEMARANHYEDYGDYWRGDYEVNGVDGYDYSRGQLIEDVEHTFEEIKPLYEHLHAYVRAKLMNAYPSYISPIGCLPAHLLGDMWGRFWTNLYSLTVPFGQKPNIDVTDAMVDQAWDAQRIFKEAEKFFVSVGLPNMTQGFWENSMLTDPGNVQKAVCHPTAWDLGKGDFRILMCTKVTMDDFLTAHNEMGNIQYDMAYAAQPFLLRNGANEGFHEAVGEIMSLSAATPKHLKSIGLLSPDFQEDNETEINFLLKQALTIVGTLPFTYMLEKWRWMVFKGEIPKDQWMKKWWEMKREIVGVVEPVPHDETYCDPASLFHVSNDYSFIRYYTRTLYQFQFQEALCQAAKHEGPLHKCDISNSTEAGQKLFNMLRLGKSEPWTLALENVVGAKNMNVRPLLNYFEPLFTWLKDQNKNSFVGWSTDWSPYADQSIKVRISLKSALGDKAYEWNDNEMYLFRSSVAYAMRQYFLKVKNQMILFGEEDVRVANLKPRISFNFFVTAPKNVSDIIPRTEVEKAIRMSRSRINDAFRLNDNSLEFLGIQPTLGESKYGPPCPPCPAPEFLGGPSVFLFPPKPKDTLMISRDPEVTCVVVDVSQEDPEVQFNWYVDGVEVHNAKTKPREEQFNSTYRVVSVLQVLHQDWLNGKEYKCKVSNKGLPSSIEKTISKAKGQPREPQVYTLPPSQEEMTKNQVSLTCLVKGFYPSDIAVEWESNGQPENNYKTTPPVLDSDGSFFLYSRLTVDKSRWQEGNVFSCSVMHEALHNHYTQKSLSLSLGK

SEQ ID NO: 37 - protein, 942 aa, artificial
  ACE2 18-732 H374N H378N with IgG1 T256D T307Q
QSTIEEQAKTFLDKFNHEAEDLFYQSSLASWNYNTNITEENVQNMNNAGDKWSAFLKEQSTLAQMYPLQEIQNLTVKLQLQALQQNGSSVLSEDKSKRLNTILNTMSTIYSTGKVCNPDNPQECLLLEPGLNEIMANSLDYNERLWAWESWRSEVGKQLRPLYEEYVVLKNEMARANHYEDYGDYWRGDYEVNGVDGYDYSRGQLIEDVEHTFEEIKPLYEHLHAYVRAKLMNAYPSYISPIGCLPAHLLGDMWGRFWTNLYSLTVPFGQKPNIDVTDAMVDQAWDAQRIFKEAEKFFVSVGLPNMTQGFWENSMLTDPGNVQKAVCHPTAWDLGKGDFRILMCTKVTMDDFLTAHNEMGNIQYDMAYAAQPFLLRNGANEGFHEAVGEIMSLSAATPKHLKSIGLLSPDFQEDNETEINFLLKQALTIVGTLPFTYMLEKWRWMVFKGEIPKDQWMKKWWEMKREIVGVVEPVPHDETYCDPASLFHVSNDYSFIRYYTRTLYQFQFQEALCQAAKHEGPLHKCDISNSTEAGQKLFNMLRLGKSEPWTLALENVVGAKNMNVRPLLNYFEPLFTWLKDQNKNSFVGWSTDWSPYADQSIKVRISLKSALGDKAYEWNDNEMYLFRSSVAYAMRQYFLKVKNQMILFGEEDVRVANLKPRISFNFFVTAPKNVSDIIPRTEVEKAIRMSRSRINDAFRLNDNSLEFLGIQPTLGDKTHTCPPCPAPELLGGPSVFLFPPKPKDTLMISRDPEVTCVVVDVSHEDPEVKFNWYVDGVEVHNAKTKPREEQYNSTYRVVSVLQVLHQDWLNGKEYKCKVSNKALPAPIEKTISKAKGQPREPQVYTLPPSRDELTKNQVSLTCLVKGFYPSDIAVEWESNGQPENNYKTTPPVLDSDGSFFLYSKLTVDKSRWQQGNVFSCSVMHEALHNHYTQKSLSLSPGK

SEQ ID NO: 38 - protein, 952 aa, artificial
  fusion protein of ACE2 18-740 H374N H378N with IgG4 YTE
QSTIEEQAKTFLDKFNHEAEDLFYQSSLASWNYNTNITEENVQNMNNAGDKWSAFLKEQSTLAQMYPLQEIQNLTVKLQLQALQQNGSSVLSEDKSKRLNTILNTMSTIYSTGKVCNPDNPQECLLLEPGLNEIMANSLDYNERLWAWESWRSEVGKQLRPLYEEYVVLKNEMARANHYEDYGDYWRGDYEVNGVDGYDYSRGQLIEDVEHTFEEIKPLYEHLHAYVRAKLMNAYPSYISPIGCLPAHLLGDMWGRFWTNLYSLTVPFGQKPNIDVTDAMVDQAWDAQRIFKEAEKFFVSVGLPNMTQGFWENSMLTDPGNVQKAVCHPTAWDLGKGDFRILMCTKVTMDDFLTAHNEMGNIQYDMAYAAQPFLLRNGANEGFHEAVGEIMSLSAATPKHLKSIGLLSPDFQEDNETEINFLLKQALTIVGTLPFTYMLEKWRWMVFKGEIPKDQWMKKWWEMKREIVGVVEPVPHDETYCDPASLFHVSNDYSFIRYYTRTLYQFQFQEALCQAAKHEGPLHKCDISNSTEAGQKLFNMLRLGKSEPWTLALENVVGAKNMNVRPLLNYFEPLFTWLKDQNKNSFVGWSTDWSPYADQSIKVRISLKSALGDKAYEWNDNEMYLFRSSVAYAMRQYFLKVKNQMILFGEEDVRVANLKPRISFNFFVTAPKNVSDIIPRTEVEKAIRMSRSRINDAFRLNDNSLEFLGIQPTLGPPNQPPVSESKYGPPCPPCPAPEFLGGPSVFLFPPKPKDTLYITREPEVTCVVVDVSQEDPEVQFNWYVDGVEVHNAKTKPREEQFNSTYRVVSVLTVLHQDWLNGKEYKCKVSNKGLPSSIEKTISKAKGQPREPQVYTLPPSQEEMTKNQVSLTCLVKGFYPSDIAVEWESNGQPENNYKTTPPVLDSDGSFFLYSRLTVDKSRWQEGNVFSCSVMHEALHNHYTQKSLSLSLGK

SEQ ID NO: 39 - protein, 950 aa, artificial
  ACE2 18-740 H374N+H378N with IgG1 YTE
QSTIEEQAKTFLDKFNHEAEDLFYQSSLASWNYNTNITEENVQNMNNAGDKWSAFLKEQSTLAQMYPLQEIQNLTVKLQLQALQQNGSSVLSEDKSKRLNTILNTMSTIYSTGKVCNPDNPQECLLLEPGLNEIMANSLDYNERLWAWESWRSEVGKQLRPLYEEYVVLKNEMARANHYEDYGDYWRGDYEVNGVDGYDYSRGQLIEDVEHTFEEIKPLYEHLHAYVRAKLMNAYPSYISPIGCLPAHLLGDMWGRFWTNLYSLTVPFGQKPNIDVTDAMVDQAWDAQRIFKEAEKFFVSVGLPNMTQGFWENSMLTDPGNVQKAVCHPTAWDLGKGDFRILMCTKVTMDDFLTAHNEMGNIQYDMAYAAQPFLLRNGANEGFHEAVGEIMSLSAATPKHLKSIGLLSPDFQEDNETEINFLLKQALTIVGTLPFTYMLEKWRWMVFKGEIPKDQWMKKWWEMKREIVGVVEPVPHDETYCDPASLFHVSNDYSFIRYYTRTLYQFQFQEALCQAAKHEGPLHKCDISNSTEAGQKLFNMLRLGKSEPWTLALENVVGAKNMNVRPLLNYFEPLFTWLKDQNKNSFVGWSTDWSPYADQSIKVRISLKSALGDKAYEWNDNEMYLFRSSVAYAMRQYFLKVKNQMILFGEEDVRVANLKPRISFNFFVTAPKNVSDIIPRTEVEKAIRMSRSRINDAFRLNDNSLEFLGIQPTLGPPNQPPVSDKTHTCPPCPAPELLGGPSVFLFPPKPKDTLYITREPEVTCVVVDVSHEDPEVKFNWYVDGVEVHNAKTKPREEQYNSTYRVVSVLTVLHQDWLNGKEYKCKVSNKALPAPIEKTISKAKGQPREPQVYTLPPSRDELTKNQVSLTCLVKGFYPSDIAVEWESNGQPENNYKTTPPVLDSDGSFFLYSKLTVDKSRWQQGNVFSCSVMHEALHNHYTQKSLSLSPGK

SEQ ID NO: 40 - protein, 952 aa, artificial
  ACE2 18-740 H374N H378N with IgG4 T256D T 307Q
QSTIEEQAKTFLDKFNHEAEDLFYQSSLASWNYNTNITEENVQNMNNAGDKWSAFLKEQSTLAQMYPLQEIQNLTVKLQLQALQQNGSSVLSEDKSKRLNTILNTMSTIYSTGKVCNPDNPQECLLLEPGLNEIMANSLDYNERLWAWESWRSEVGKQLRPLYEEYVVLKNEMARANHYEDYGDYWRGDYEVNGVDGYDYSRGQLIEDVEHTFEEIKPLYEHLHAYVRAKLMNAYPSYISPIGCLPAHLLGDMWGRFWTNLYSLTVPFGQKPNIDVTDAMVDQAWDAQRIFKEAEKFFVSVGLPNMTQGFWENSMLTDPGNVQKAVCHPTAWDLGKGDFRILMCTKVTMDDFLTAHNEMGNIQYDMAYAAQPFLLRNGANEGFHEAVGEIMSLSAATPKHLKSIGLLSPDFQEDNETEINFLLKQALTIVGTLPFTYMLEKWRWMVFKGEIPKDQWMKKWWEMKREIVGVVEPVPHDETYCDPASLFHVSNDYSFIRYYTRTLYQFQFQEALCQAAKHEGPLHKCDISNSTEAGQKLFNMLRLGKSEPWTLALENVVGAKNMNVRPLLNYFEPLFTWLKDQNKNSFVGWSTDWSPYADQSIKVRISLKSALGDKAYEWNDNEMYLFRSSVAYAMRQYFLKVKNQMILFGEEDVRVANLKPRISFNFFVTAPKNVSDIIPRTEVEKAIRMSRSRINDAFRLNDNSLEFLGIQPTLGPPNQPPVSESKYGPPCPPCPAPEFLGGPSVFLFPPKPKDTLMISRDPEVTCVVVDVSQEDPEVQFNWYVDGVEVHNAKTKPREEQFNSTYRVVSVLQVLHQDWLNGKEYKCKVSNKGLPSSIEKTISKAKGQPREPQVYTLPPSQEEMTKNQVSLTCLVKGFYPSDIAVEWESNGQPENNYKTTPPVLDSDGSFFLYSRLTVDKSRWQEGNVFSCSVMHEALHNHYTQKSLSLSLGK

SEQ ID NO: 41 - protein, 950 aa, artificial
  ACE2 18-740 H374N H378N with IgG1 T256D T307Q
QSTIEEQAKTFLDKFNHEAEDLFYQSSLASWNYNTNITEENVQNMNNAGDKWSAFLKEQSTLAQMYPLQEIQNLTVKLQLQALQQNGSSVLSEDKSKRLNTILNTMSTIYSTGKVCNPDNPQECLLLEPGLNEIMANSLDYNERLWAWESWRSEVGKQLRPLYEEYVVLKNEMARANHYEDYGDYWRGDYEVNGVDGYDYSRGQLIEDVEHTFEEIKPLYEHLHAYVRAKLMNAYPSYISPIGCLPAHLLGDMWGRFWTNLYSLTVPFGQKPNIDVTDAMVDQAWDAQRIFKEAEKFFVSVGLPNMTQGFWENSMLTDPGNVQKAVCHPTAWDLGKGDFRILMCTKVTMDDFLTAHNEMGNIQYDMAYAAQPFLLRNGANEGFHEAVGEIMSLSAATPKHLKSIGLLSPDFQEDNETEINFLLKQALTIVGTLPFTYMLEKWRWMVFKGEIPKDQWMKKWWEMKREIVGVVEPVPHDETYCDPASLFHVSNDYSFIRYYTRTLYQFQFQEALCQAAKHEGPLHKCDISNSTEAGQKLFNMLRLGKSEPWTLALENVVGAKNMNVRPLLNYFEPLFTWLKDQNKNSFVGWSTDWSPYADQSIKVRISLKSALGDKAYEWNDNEMYLFRSSVAYAMRQYFLKVKNQMILFGEEDVRVANLKPRISFNFFVTAPKNVSDIIPRTEVEKAIRMSRSRINDAFRLNDNSLEFLGIQPTLGPPNQPPVSDKTHTCPPCPAPELLGGPSVFLFPPKPKDTLMISRDPEVTCVVVDVSHEDPEVKFNWYVDGVEVHNAKTKPREEQYNSTYRVVSVLQVLHQDWLNGKEYKCKVSNKALPAPIEKTISKAKGQPREPQVYTLPPSRDELTKNQVSLTCLVKGFYPSDIAVEWESNGQPENNYKTTPPVLDSDGSFFLYSKLTVDKSRWQQGNVFSCSVMHEALHNHYTQKSLSLSPGK

SEQ ID NO: 42 - protein, 715 aa, artificial
  ACE2 18-732 R273A
QSTIEEQAKTFLDKFNHEAEDLFYQSSLASWNYNTNITEENVQNMNNAGDKWSAFLKEQSTLAQMYPLQEIQNLTVKLQLQALQQNGSSVLSEDKSKRLNTILNTMSTIYSTGKVCNPDNPQECLLLEPGLNEIMANSLDYNERLWAWESWRSEVGKQLRPLYEEYVVLKNEMARANHYEDYGDYWRGDYEVNGVDGYDYSRGQLIEDVEHTFEEIKPLYEHLHAYVRAKLMNAYPSYISPIGCLPAHLLGDMWGAFWTNLYSLTVPFGQKPNIDVTDAMVDQAWDAQRIFKEAEKFFVSVGLPNMTQGFWENSMLTDPGNVQKAVCHPTAWDLGKGDFRILMCTKVTMDDFLTAHHEMGHIQYDMAYAAQPFLLRNGANEGFHEAVGEIMSLSAATPKHLKSIGLLSPDFQEDNETEINFLLKQALTIVGTLPFTYMLEKWRWMVFKGEIPKDQWMKKWWEMKREIVGVVEPVPHDETYCDPASLFHVSNDYSFIRYYTRTLYQFQFQEALCQAAKHEGPLHKCDISNSTEAGQKLFNMLRLGKSEPWTLALENVVGAKNMNVRPLLNYFEPLFTWLKDQNKNSFVGWSTDWSPYADQSIKVRISLKSALGDKAYEWNDNEMYLFRSSVAYAMRQYFLKVKNQMILFGEEDVRVANLKPRISFNFFVTAPKNVSDIIPRTEVEKAIRMSRSRINDAFRLNDNSLEFLGIQPTLG

SEQ ID NO: 43 - protein, 723 aa, artificial
  ACE2 18-740 R273A
QSTIEEQAKTFLDKFNHEAEDLFYQSSLASWNYNTNITEENVQNMNNAGDKWSAFLKEQSTLAQMYPLQEIQNLTVKLQLQALQQNGSSVLSEDKSKRLNTILNTMSTIYSTGKVCNPDNPQECLLLEPGLNEIMANSLDYNERLWAWESWRSEVGKQLRPLYEEYVVLKNEMARANHYEDYGDYWRGDYEVNGVDGYDYSRGQLIEDVEHTFEEIKPLYEHLHAYVRAKLMNAYPSYISPIGCLPAHLLGDMWGAFWTNLYSLTVPFGQKPNIDVTDAMVDQAWDAQRIFKEAEKFFVSVGLPNMTQGFWENSMLTDPGNVQKAVCHPTAWDLGKGDFRILMCTKVTMDDFLTAHHEMGHIQYDMAYAAQPFLLRNGANEGFHEAVGEIMSLSAATPKHLKSIGLLSPDFQEDNETEINFLLKQALTIVGTLPFTYMLEKWRWMVFKGEIPKDQWMKKWWEMKREIVGVVEPVPHDETYCDPASLFHVSNDYSFIRYYTRTLYQFQFQEALCQAAKHEGPLHKCDISNSTEAGQKLFNMLRLGKSEPWTLALENVVGAKNMNVRPLLNYFEPLFTWLKDQNKNSFVGWSTDWSPYADQSIKVRISLKSALGDKAYEWNDNEMYLFRSSVAYAMRQYFLKVKNQMILFGEEDVRVANLKPRISFNFFVTAPKNVSDIIPRTEVEKAIRMSRSRINDAFRLNDNSLEFLGIQPTLGPPNQPPVS

SEQ ID NO: 44 - protein, 944 aa, artificial
  ACE2 18-732 R273A with IgG4 wt
QSTIEEQAKTFLDKFNHEAEDLFYQSSLASWNYNTNITEENVQNMNNAGDKWSAFLKEQSTLAQMYPLQEIQNLTVKLQLQALQQNGSSVLSEDKSKRLNTILNTMSTIYSTGKVCNPDNPQECLLLEPGLNEIMANSLDYNERLWAWESWRSEVGKQLRPLYEEYVVLKNEMARANHYEDYGDYWRGDYEVNGVDGYDYSRGQLIEDVEHTFEEIKPLYEHLHAYVRAKLMNAYPSYISPIGCLPAHLLGDMWGAFWTNLYSLTVPFGQKPNIDVTDAMVDQAWDAQRIFKEAEKFFVSVGLPNMTQGFWENSMLTDPGNVQKAVCHPTAWDLGKGDFRILMCTKVTMDDFLTAHHEMGHIQYDMAYAAQPFLLRNGANEGFHEAVGEIMSLSAATPKHLKSIGLLSPDFQEDNETEINFLLKQALTIVGTLPFTYMLEKWRWMVFKGEIPKDQWMKKWWEMKREIVGVVEPVPHDETYCDPASLFHVSNDYSFIRYYTRTLYQFQFQEALCQAAKHEGPLHKCDISNSTEAGQKLFNMLRLGKSEPWTLALENVVGAKNMNVRPLLNYFEPLFTWLKDQNKNSFVGWSTDWSPYADQSIKVRISLKSALGDKAYEWNDNEMYLFRSSVAYAMRQYFLKVKNQMILFGEEDVRVANLKPRISFNFFVTAPKNVSDIIPRTEVEKAIRMSRSRINDAFRLNDNSLEFLGIQPTLGESKYGPPCPPCPAPEFLGGPSVFLFPPKPKDTLMISRTPEVTCVVVDVSQEDPEVQFNWYVDGVEVHNAKTKPREEQFNSTYRVVSVLTVLHQDWLNGKEYKCKVSNKGLPSSIEKTISKAKGQPREPQVYTLPPSQEEMTKNQVSLTCLVKGFYPSDIAVEWESNGQPENNYKTTPPVLDSDGSFFLYSRLTVDKSRWQEGNVFSCSVMHEALHNHYTQKSLSLSLGK

SEQ ID NO: 45 - protein, 942 aa, artificial
  ACE2 18-732 R273A with IgG1 wt
QSTIEEQAKTFLDKFNHEAEDLFYQSSLASWNYNTNITEENVQNMNNAGDKWSAFLKEQSTLAQMYPLQEIQNLTVKLQLQALQQNGSSVLSEDKSKRLNTILNTMSTIYSTGKVCNPDNPQECLLLEPGLNEIMANSLDYNERLWAWESWRSEVGKQLRPLYEEYVVLKNEMARANHYEDYGDYWRGDYEVNGVDGYDYSRGQLIEDVEHTFEEIKPLYEHLHAYVRAKLMNAYPSYISPIGCLPAHLLGDMWGAFWTNLYSLTVPFGQKPNIDVTDAMVDQAWDAQRIFKEAEKFFVSVGLPNMTQGFWENSMLTDPGNVQKAVCHPTAWDLGKGDFRILMCTKVTMDDFLTAHHEMGHIQYDMAYAAQPFLLRNGANEGFHEAVGEIMSLSAATPKHLKSIGLLSPDFQEDNETEINFLLKQALTIVGTLPFTYMLEKWRWMVFKGEIPKDQWMKKWWEMKREIVGVVEPVPHDETYCDPASLFHVSNDYSFIRYYTRTLYQFQFQEALCQAAKHEGPLHKCDISNSTEAGQKLFNMLRLGKSEPWTLALENVVGAKNMNVRPLLNYFEPLFTWLKDQNKNSFVGWSTDWSPYADQSIKVRISLKSALGDKAYEWNDNEMYLFRSSVAYAMRQYFLKVKNQMILFGEEDVRVANLKPRISFNFFVTAPKNVSDIIPRTEVEKAIRMSRSRINDAFRLNDNSLEFLGIQPTLGDKTHTCPPCPAPELLGGPSVFLFPPKPKDTLMISRTPEVTCVVVDVSHEDPEVKFNWYVDGVEVHNAKTKPREEQYNSTYRVVSVLTVLHQDWLNGKEYKCKVSNKALPAPIEKTISKAKGQPREPQVYTLPPSRDELTKNQVSLTCLVKGFYPSDIAVEWESNGQPENNYKTTPPVLDSDGSFFLYSKLTVDKSRWQQGNVFSCSVMHEALHNHYTQKSLSLSPGK

SEQ ID NO: 46 - protein, 952 aa, artificial
  ACE2 18-740 R273A with IgG4 wt
QSTIEEQAKTFLDKFNHEAEDLFYQSSLASWNYNTNITEENVQNMNNAGDKWSAFLKEQSTLAQMYPLQEIQNLTVKLQLQALQQNGSSVLSEDKSKRLNTILNTMSTIYSTGKVCNPDNPQECLLLEPGLNEIMANSLDYNERLWAWESWRSEVGKQLRPLYEEYVVLKNEMARANHYEDYGDYWRGDYEVNGVDGYDYSRGQLIEDVEHTFEEIKPLYEHLHAYVRAKLMNAYPSYISPIGCLPAHLLGDMWGAFWTNLYSLTVPFGQKPNIDVTDAMVDQAWDAQRIFKEAEKFFVSVGLPNMTQGFWENSMLTDPGNVQKAVCHPTAWDLGKGDFRILMCTKVTMDDFLTAHHEMGHIQYDMAYAAQPFLLRNGANEGFHEAVGEIMSLSAATPKHLKSIGLLSPDFQEDNETEINFLLKQALTIVGTLPFTYMLEKWRWMVFKGEIPKDQWMKKWWEMKREIVGVVEPVPHDETYCDPASLFHVSNDYSFIRYYTRTLYQFQFQEALCQAAKHEGPLHKCDISNSTEAGQKLFNMLRLGKSEPWTLALENVVGAKNMNVRPLLNYFEPLFTWLKDQNKNSFVGWSTDWSPYADQSIKVRISLKSALGDKAYEWNDNEMYLFRSSVAYAMRQYFLKVKNQMILFGEEDVRVANLKPRISFNFFVTAPKNVSDIIPRTEVEKAIRMSRSRINDAFRLNDNSLEFLGIQPTLGPPNQPPVSESKYGPPCPPCPAPEFLGGPSVFLFPPKPKDTLMISRTPEVTCVVVDVSQEDPEVQFNWYVDGVEVHNAKTKPREEQFNSTYRVVSVLTVLHQDWLNGKEYKCKVSNKGLPSSIEKTISKAKGQPREPQVYTLPPSQEEMTKNQVSLTCLVKGFYPSDIAVEWESNGQPENNYKTTPPVLDSDGSFFLYSRLTVDKSRWQEGNVFSCSVMHEALHNHYTQKSLSLSLGK

SEQ ID NO: 47 - protein, 950 aa, artificial
  ACE2 18-740 R273A with IgG1 wt
QSTIEEQAKTFLDKFNHEAEDLFYQSSLASWNYNTNITEENVQNMNNAGDKWSAFLKEQSTLAQMYPLQEIQNLTVKLQLQALQQNGSSVLSEDKSKRLNTILNTMSTIYSTGKVCNPDNPQECLLLEPGLNEIMANSLDYNERLWAWESWRSEVGKQLRPLYEEYVVLKNEMARANHYEDYGDYWRGDYEVNGVDGYDYSRGQLIEDVEHTFEEIKPLYEHLHAYVRAKLMNAYPSYISPIGCLPAHLLGDMWGAFWTNLYSLTVPFGQKPNIDVTDAMVDQAWDAQRIFKEAEKFFVSVGLPNMTQGFWENSMLTDPGNVQKAVCHPTAWDLGKGDFRILMCTKVTMDDFLTAHHEMGHIQYDMAYAAQPFLLRNGANEGFHEAVGEIMSLSAATPKHLKSIGLLSPDFQEDNETEINFLLKQALTIVGTLPFTYMLEKWRWMVFKGEIPKDQWMKKWWEMKREIVGVVEPVPHDETYCDPASLFHVSNDYSFIRYYTRTLYQFQFQEALCQAAKHEGPLHKCDISNSTEAGQKLFNMLRLGKSEPWTLALENVVGAKNMNVRPLLNYFEPLFTWLKDQNKNSFVGWSTDWSPYADQSIKVRISLKSALGDKAYEWNDNEMYLFRSSVAYAMRQYFLKVKNQMILFGEEDVRVANLKPRISFNFFVTAPKNVSDIIPRTEVEKAIRMSRSRINDAFRLNDNSLEFLGIQPTLGPPNQPPVSDKTHTCPPCPAPELLGGPSVFLFPPKPKDTLMISRTPEVTCVVVDVSHEDPEVKFNWYVDGVEVHNAKTKPREEQYNSTYRVVSVLTVLHQDWLNGKEYKCKVSNKALPAPIEKTISKAKGQPREPQVYTLPPSRDELTKNQVSLTCLVKGFYPSDIAVEWESNGQPENNYKTTPPVLDSDGSFFLYSKLTVDKSRWQQGNVFSCSVMHEALHNHYTQKSLSLSPGK

SEQ ID NO: 48 - protein, 944 aa, artificial
  ACE2 18-732 R273A with IgG4 YTE
QSTIEEQAKTFLDKFNHEAEDLFYQSSLASWNYNTNITEENVQNMNNAGDKWSAFLKEQSTLAQMYPLQEIQNLTVKLQLQALQQNGSSVLSEDKSKRLNTILNTMSTIYSTGKVCNPDNPQECLLLEPGLNEIMANSLDYNERLWAWESWRSEVGKQLRPLYEEYVVLKNEMARANHYEDYGDYWRGDYEVNGVDGYDYSRGQLIEDVEHTFEEIKPLYEHLHAYVRAKLMNAYPSYISPIGCLPAHLLGDMWGAFWTNLYSLTVPFGQKPNIDVTDAMVDQAWDAQRIFKEAEKFFVSVGLPNMTQGFWENSMLTDPGNVQKAVCHPTAWDLGKGDFRILMCTKVTMDDFLTAHHEMGHIQYDMAYAAQPFLLRNGANEGFHEAVGEIMSLSAATPKHLKSIGLLSPDFQEDNETEINFLLKQALTIVGTLPFTYMLEKWRWMVFKGEIPKDQWMKKWWEMKREIVGVVEPVPHDETYCDPASLFHVSNDYSFIRYYTRTLYQFQFQEALCQAAKHEGPLHKCDISNSTEAGQKLFNMLRLGKSEPWTLALENVVGAKNMNVRPLLNYFEPLFTWLKDQNKNSFVGWSTDWSPYADQSIKVRISLKSALGDKAYEWNDNEMYLFRSSVAYAMRQYFLKVKNQMILFGEEDVRVANLKPRISFNFFVTAPKNVSDIIPRTEVEKAIRMSRSRINDAFRLNDNSLEFLGIQPTLGESKYGPPCPPCPAPEFLGGPSVFLFPPKPKDTLYITREPEVTCVVVDVSQEDPEVQFNWYVDGVEVHNAKTKPREEQFNSTYRVVSVLTVLHQDWLNGKEYKCKVSNKGLPSSIEKTISKAKGQPREPQVYTLPPSQEEMTKNQVSLTCLVKGFYPSDIAVEWESNGQPENNYKTTPPVLDSDGSFFLYSRLTVDKSRWQEGNVFSCSVMHEALHNHYTQKSLSLSLGK

SEQ ID NO: 49 - protein, 942 aa, artificial
  ACE2 18-732 R273A with IgG1 YTE
QSTIEEQAKTFLDKFNHEAEDLFYQSSLASWNYNTNITEENVQNMNNAGDKWSAFLKEQSTLAQMYPLQEIQNLTVKLQLQALQQNGSSVLSEDKSKRLNTILNTMSTIYSTGKVCNPDNPQECLLLEPGLNEIMANSLDYNERLWAWESWRSEVGKQLRPLYEEYVVLKNEMARANHYEDYGDYWRGDYEVNGVDGYDYSRGQLIEDVEHTFEEIKPLYEHLHAYVRAKLMNAYPSYISPIGCLPAHLLGDMWGAFWTNLYSLTVPFGQKPNIDVTDAMVDQAWDAQRIFKEAEKFFVSVGLPNMTQGFWENSMLTDPGNVQKAVCHPTAWDLGKGDFRILMCTKVTMDDFLTAHHEMGHIQYDMAYAAQPFLLRNGANEGFHEAVGEIMSLSAATPKHLKSIGLLSPDFQEDNETEINFLLKQALTIVGTLPFTYMLEKWRWMVFKGEIPKDQWMKKWWEMKREIVGVVEPVPHDETYCDPASLFHVSNDYSFIRYYTRTLYQFQFQEALCQAAKHEGPLHKCDISNSTEAGQKLFNMLRLGKSEPWTLALENVVGAKNMNVRPLLNYFEPLFTWLKDQNKNSFVGWSTDWSPYADQSIKVRISLKSALGDKAYEWNDNEMYLFRSSVAYAMRQYFLKVKNQMILFGEEDVRVANLKPRISFNFFVTAPKNVSDIIPRTEVEKAIRMSRSRINDAFRLNDNSLEFLGIQPTLGDKTHTCPPCPAPELLGGPSVFLFPPKPKDTLYITREPEVTCVVVDVSHEDPEVKFNWYVDGVEVHNAKTKPREEQYNSTYRVVSVLTVLHQDWLNGKEYKCKVSNKALPAPIEKTISKAKGQPREPQVYTLPPSRDELTKNQVSLTCLVKGFYPSDIAVEWESNGQPENNYKTTPPVLDSDGSFFLYSKLTVDKSRWQQGNVFSCSVMHEALHNHYTQKSLSLSPGK

SEQ ID NO: 50 - protein, 944 aa, artificial
  ACE2 18-732 R273A with IgG4 T256D T307Q
QSTIEEQAKTFLDKFNHEAEDLFYQSSLASWNYNTNITEENVQNMNNAGDKWSAFLKEQSTLAQMYPLQEIQNLTVKLQLQALQQNGSSVLSEDKSKRLNTILNTMSTIYSTGKVCNPDNPQECLLLEPGLNEIMANSLDYNERLWAWESWRSEVGKQLRPLYEEYVVLKNEMARANHYEDYGDYWRGDYEVNGVDGYDYSRGQLIEDVEHTFEEIKPLYEHLHAYVRAKLMNAYPSYISPIGCLPAHLLGDMWGAFWTNLYSLTVPFGQKPNIDVTDAMVDQAWDAQRIFKEAEKFFVSVGLPNMTQGFWENSMLTDPGNVQKAVCHPTAWDLGKGDFRILMCTKVTMDDFLTAHHEMGHIQYDMAYAAQPFLLRNGANEGFHEAVGEIMSLSAATPKHLKSIGLLSPDFQEDNETEINFLLKQALTIVGTLPFTYMLEKWRWMVFKGEIPKDQWMKKWWEMKREIVGVVEPVPHDETYCDPASLFHVSNDYSFIRYYTRTLYQFQFQEALCQAAKHEGPLHKCDISNSTEAGQKLFNMLRLGKSEPWTLALENVVGAKNMNVRPLLNYFEPLFTWLKDQNKNSFVGWSTDWSPYADQSIKVRISLKSALGDKAYEWNDNEMYLFRSSVAYAMRQYFLKVKNQMILFGEEDVRVANLKPRISFNFFVTAPKNVSDIIPRTEVEKAIRMSRSRINDAFRLNDNSLEFLGIQPTLGESKYGPPCPPCPAPEFLGGPSVFLFPPKPKDTLMISRDPEVTCVVVDVSQEDPEVQFNWYVDGVEVHNAKTKPREEQFNSTYRVVSVLQVLHQDWLNGKEYKCKVSNKGLPSSIEKTISKAKGQPREPQVYTLPPSQEEMTKNQVSLTCLVKGFYPSDIAVEWESNGQPENNYKTTPPVLDSDGSFFLYSRLTVDKSRWQEGNVFSCSVMHEALHNHYTQKSLSLSLGK

SEQ ID NO: 51 - protein, 942 aa, artificial
  ACE2 18-732 R273A with IgG1 T256D T307Q
QSTIEEQAKTFLDKFNHEAEDLFYQSSLASWNYNTNITEENVQNMNNAGDKWSAFLKEQSTLAQMYPLQEIQNLTVKLQLQALQQNGSSVLSEDKSKRLNTILNTMSTIYSTGKVCNPDNPQECLLLEPGLNEIMANSLDYNERLWAWESWRSEVGKQLRPLYEEYVVLKNEMARANHYEDYGDYWRGDYEVNGVDGYDYSRGQLIEDVEHTFEEIKPLYEHLHAYVRAKLMNAYPSYISPIGCLPAHLLGDMWGAFWTNLYSLTVPFGQKPNIDVTDAMVDQAWDAQRIFKEAEKFFVSVGLPNMTQGFWENSMLTDPGNVQKAVCHPTAWDLGKGDFRILMCTKVTMDDFLTAHHEMGHIQYDMAYAAQPFLLRNGANEGFHEAVGEIMSLSAATPKHLKSIGLLSPDFQEDNETEINFLLKQALTIVGTLPFTYMLEKWRWMVFKGEIPKDQWMKKWWEMKREIVGVVEPVPHDETYCDPASLFHVSNDYSFIRYYTRTLYQFQFQEALCQAAKHEGPLHKCDISNSTEAGQKLFNMLRLGKSEPWTLALENVVGAKNMNVRPLLNYFEPLFTWLKDQNKNSFVGWSTDWSPYADQSIKVRISLKSALGDKAYEWNDNEMYLFRSSVAYAMRQYFLKVKNQMILFGEEDVRVANLKPRISFNFFVTAPKNVSDIIPRTEVEKAIRMSRSRINDAFRLNDNSLEFLGIQPTLGDKTHTCPPCPAPELLGGPSVFLFPPKPKDTLMISRDPEVTCVVVDVSHEDPEVKFNWYVDGVEVHNAKTKPREEQYNSTYRVVSVLQVLHQDWLNGKEYKCKVSNKALPAPIEKTISKAKGQPREPQVYTLPPSRDELTKNQVSLTCLVKGFYPSDIAVEWESNGQPENNYKTTPPVLDSDGSFFLYSKLTVDKSRWQQGNVFSCSVMHEALHNHYTQKSLSLSPGK

SEQ ID NO: 52 - protein, 952 aa, artificial
  ACE2 18-740 R273A with IgG4 YTE
QSTIEEQAKTFLDKFNHEAEDLFYQSSLASWNYNTNITEENVQNMNNAGDKWSAFLKEQSTLAQMYPLQEIQNLTVKLQLQALQQNGSSVLSEDKSKRLNTILNTMSTIYSTGKVCNPDNPQECLLLEPGLNEIMANSLDYNERLWAWESWRSEVGKQLRPLYEEYVVLKNEMARANHYEDYGDYWRGDYEVNGVDGYDYSRGQLIEDVEHTFEEIKPLYEHLHAYVRAKLMNAYPSYISPIGCLPAHLLGDMWGAFWTNLYSLTVPFGQKPNIDVTDAMVDQAWDAQRIFKEAEKFFVSVGLPNMTQGFWENSMLTDPGNVQKAVCHPTAWDLGKGDFRILMCTKVTMDDFLTAHHEMGHIQYDMAYAAQPFLLRNGANEGFHEAVGEIMSLSAATPKHLKSIGLLSPDFQEDNETEINFLLKQALTIVGTLPFTYMLEKWRWMVFKGEIPKDQWMKKWWEMKREIVGVVEPVPHDETYCDPASLFHVSNDYSFIRYYTRTLYQFQFQEALCQAAKHEGPLHKCDISNSTEAGQKLFNMLRLGKSEPWTLALENVVGAKNMNVRPLLNYFEPLFTWLKDQNKNSFVGWSTDWSPYADQSIKVRISLKSALGDKAYEWNDNEMYLFRSSVAYAMRQYFLKVKNQMILFGEEDVRVANLKPRISFNFFVTAPKNVSDIIPRTEVEKAIRMSRSRINDAFRLNDNSLEFLGIQPTLGPPNQPPVSESKYGPPCPPCPAPEFLGGPSVFLFPPKPKDTLYITREPEVTCVVVDVSQEDPEVQFNWYVDGVEVHNAKTKPREEQFNSTYRVVSVLTVLHQDWLNGKEYKCKVSNKGLPSSIEKTISKAKGQPREPQVYTLPPSQEEMTKNQVSLTCLVKGFYPSDIAVEWESNGQPENNYKTTPPVLDSDGSFFLYSRLTVDKSRWQEGNVFSCSVMHEALHNHYTQKSLSLSLGK

SEQ ID NO: 53 - protein, 950 aa, artificial
  ACE2 18-740 R273 A with IgG1 YTE
QSTIEEQAKTFLDKFNHEAEDLFYQSSLASWNYNTNITEENVQNMNNAGDKWSAFLKEQSTLAQMYPLQEIQNLTVKLQLQALQQNGSSVLSEDKSKRLNTILNTMSTIYSTGKVCNPDNPQECLLLEPGLNEIMANSLDYNERLWAWESWRSEVGKQLRPLYEEYVVLKNEMARANHYEDYGDYWRGDYEVNGVDGYDYSRGQLIEDVEHTFEEIKPLYEHLHAYVRAKLMNAYPSYISPIGCLPAHLLGDMWGAFWTNLYSLTVPFGQKPNIDVTDAMVDQAWDAQRIFKEAEKFFVSVGLPNMTQGFWENSMLTDPGNVQKAVCHPTAWDLGKGDFRILMCTKVTMDDFLTAHHEMGHIQYDMAYAAQPFLLRNGANEGFHEAVGEIMSLSAATPKHLKSIGLLSPDFQEDNETEINFLLKQALTIVGTLPFTYMLEKWRWMVFKGEIPKDQWMKKWWEMKREIVGVVEPVPHDETYCDPASLFHVSNDYSFIRYYTRTLYQFQFQEALCQAAKHEGPLHKCDISNSTEAGQKLFNMLRLGKSEPWTLALENVVGAKNMNVRPLLNYFEPLFTWLKDQNKNSFVGWSTDWSPYADQSIKVRISLKSALGDKAYEWNDNEMYLFRSSVAYAMRQYFLKVKNQMILFGEEDVRVANLKPRISFNFFVTAPKNVSDIIPRTEVEKAIRMSRSRINDAFRLNDNSLEFLGIQPTLGPPNQPPVSDKTHTCPPCPAPELLGGPSVFLFPPKPKDTLYITREPEVTCVVVDVSHEDPEVKFNWYVDGVEVHNAKTKPREEQYNSTYRVVSVLTVLHQDWLNGKEYKCKVSNKALPAPIEKTISKAKGQPREPQVYTLPPSRDELTKNQVSLTCLVKGFYPSDIAVEWESNGQPENNYKTTPPVLDSDGSFFLYSKLTVDKSRWQQGNVFSCSVMHEALHNHYTQKSLSLSPGK

SEQ ID NO: 54 - protein, 952 aa, artificial
  ACE2 18-740 R273A with IgG4 T256D T307Q
QSTIEEQAKTFLDKFNHEAEDLFYQSSLASWNYNTNITEENVQNMNNAGDKWSAFLKEQSTLAQMYPLQEIQNLTVKLQLQALQQNGSSVLSEDKSKRLNTILNTMSTIYSTGKVCNPDNPQECLLLEPGLNEIMANSLDYNERLWAWESWRSEVGKQLRPLYEEYVVLKNEMARANHYEDYGDYWRGDYEVNGVDGYDYSRGQLIEDVEHTFEEIKPLYEHLHAYVRAKLMNAYPSYISPIGCLPAHLLGDMWGAFWTNLYSLTVPFGQKPNIDVTDAMVDQAWDAQRIFKEAEKFFVSVGLPNMTQGFWENSMLTDPGNVQKAVCHPTAWDLGKGDFRILMCTKVTMDDFLTAHHEMGHIQYDMAYAAQPFLLRNGANEGFHEAVGEIMSLSAATPKHLKSIGLLSPDFQEDNETEINFLLKQALTIVGTLPFTYMLEKWRWMVFKGEIPKDQWMKKWWEMKREIVGVVEPVPHDETYCDPASLFHVSNDYSFIRYYTRTLYQFQFQEALCQAAKHEGPLHKCDISNSTEAGQKLFNMLRLGKSEPWTLALENVVGAKNMNVRPLLNYFEPLFTWLKDQNKNSFVGWSTDWSPYADQSIKVRISLKSALGDKAYEWNDNEMYLFRSSVAYAMRQYFLKVKNQMILFGEEDVRVANLKPRISFNFFVTAPKNVSDIIPRTEVEKAIRMSRSRINDAFRLNDNSLEFLGIQPTLGPPNQPPVSESKYGPPCPPCPAPEFLGGPSVFLFPPKPKDTLMISRDPEVTCVVVDVSQEDPEVQFNWYVDGVEVHNAKTKPREEQFNSTYRVVSVLQVLHQDWLNGKEYKCKVSNKGLPSSIEKTISKAKGQPREPQVYTLPPSQEEMTKNQVSLTCLVKGFYPSDIAVEWESNGQPENNYKTTPPVLDSDGSFFLYSRLTVDKSRWQEGNVFSCSVMHEALHNHYTQKSLSLSLGK

SEQ ID NO: 55 - protein, 950 aa, artificial
  ACE2 18-740 R273A with IgG1 T256D T307Q
QSTIEEQAKTFLDKFNHEAEDLFYQSSLASWNYNTNITEENVQNMNNAGDKWSAFLKEQSTLAQMYPLQEIQNLTVKLQLQALQQNGSSVLSEDKSKRLNTILNTMSTIYSTGKVCNPDNPQECLLLEPGLNEIMANSLDYNERLWAWESWRSEVGKQLRPLYEEYVVLKNEMARANHYEDYGDYWRGDYEVNGVDGYDYSRGQLIEDVEHTFEEIKPLYEHLHAYVRAKLMNAYPSYISPIGCLPAHLLGDMWGAFWTNLYSLTVPFGQKPNIDVTDAMVDQAWDAQRIFKEAEKFFVSVGLPNMTQGFWENSMLTDPGNVQKAVCHPTAWDLGKGDFRILMCTKVTMDDFLTAHHEMGHIQYDMAYAAQPFLLRNGANEGFHEAVGEIMSLSAATPKHLKSIGLLSPDFQEDNETEINFLLKQALTIVGTLPFTYMLEKWRWMVFKGEIPKDQWMKKWWEMKREIVGVVEPVPHDETYCDPASLFHVSNDYSFIRYYTRTLYQFQFQEALCQAAKHEGPLHKCDISNSTEAGQKLFNMLRLGKSEPWTLALENVVGAKNMNVRPLLNYFEPLFTWLKDQNKNSFVGWSTDWSPYADQSIKVRISLKSALGDKAYEWNDNEMYLFRSSVAYAMRQYFLKVKNQMILFGEEDVRVANLKPRISFNFFVTAPKNVSDIIPRTEVEKAIRMSRSRINDAFRLNDNSLEFLGIQPTLGPPNQPPVSDKTHTCPPCPAPELLGGPSVFLFPPKPKDTLMISRDPEVTCVVVDVSHEDPEVKFNWYVDGVEVHNAKTKPREEQYNSTYRVVSVLQVLHQDWLNGKEYKCKVSNKALPAPIEKTISKAKGQPREPQVYTLPPSRDELTKNQVSLTCLVKGFYPSDIAVEWESNGQPENNYKTTPPVLDSDGSFFLYSKLTVDKSRWQQGNVFSCSVMHEALHNHYTQKSLSLSPGK

SEQ ID NO: 56 - protein, 715 aa, artificial
  ACE2 18-732 S645C
QSTIEEQAKTFLDKFNHEAEDLFYQSSLASWNYNTNITEENVQNMNNAGDKWSAFLKEQSTLAQMYPLQEIQNLTVKLQLQALQQNGSSVLSEDKSKRLNTILNTMSTIYSTGKVCNPDNPQECLLLEPGLNEIMANSLDYNERLWAWESWRSEVGKQLRPLYEEYVVLKNEMARANHYEDYGDYWRGDYEVNGVDGYDYSRGQLIEDVEHTFEEIKPLYEHLHAYVRAKLMNAYPSYISPIGCLPAHLLGDMWGRFWTNLYSLTVPFGQKPNIDVTDAMVDQAWDAQRIFKEAEKFFVSVGLPNMTQGFWENSMLTDPGNVQKAVCHPTAWDLGKGDFRILMCTKVTMDDFLTAHHEMGHIQYDMAYAAQPFLLRNGANEGFHEAVGEIMSLSAATPKHLKSIGLLSPDFQEDNETEINFLLKQALTIVGTLPFTYMLEKWRWMVFKGEIPKDQWMKKWWEMKREIVGVVEPVPHDETYCDPASLFHVSNDYSFIRYYTRTLYQFQFQEALCQAAKHEGPLHKCDISNSTEAGQKLFNMLRLGKSEPWTLALENVVGAKNMNVRPLLNYFEPLFTWLKDQNKNSFVGWSTDWSPYADQSIKVRISLKSALGDKAYEWNDNEMYLFRCSVAYAMRQYFLKVKNQMILFGEEDVRVANLKPRISFNFFVTAPKNVSDIIPRTEVEKAIRMSRSRINDAFRLNDNSLEFLGIQPTLG

SEQ ID NO: 57 - protein, 723 aa, artificial
  ACE2 18-740 S645C
QSTIEEQAKTFLDKFNHEAEDLFYQSSLASWNYNTNITEENVQNMNNAGDKWSAFLKEQSTLAQMYPLQEIQNLTVKLQLQALQQNGSSVLSEDKSKRLNTILNTMSTIYSTGKVCNPDNPQECLLLEPGLNEIMANSLDYNERLWAWESWRSEVGKQLRPLYEEYVVLKNEMARANHYEDYGDYWRGDYEVNGVDGYDYSRGQLIEDVEHTFEEIKPLYEHLHAYVRAKLMNAYPSYISPIGCLPAHLLGDMWGRFWTNLYSLTVPFGQKPNIDVTDAMVDQAWDAQRIFKEAEKFFVSVGLPNMTQGFWENSMLTDPGNVQKAVCHPTAWDLGKGDFRILMCTKVTMDDFLTAHHEMGHIQYDMAYAAQPFLLRNGANEGFHEAVGEIMSLSAATPKHLKSIGLLSPDFQEDNETEINFLLKQALTIVGTLPFTYMLEKWRWMVFKGEIPKDQWMKKWWEMKREIVGVVEPVPHDETYCDPASLFHVSNDYSFIRYYTRTLYQFQFQEALCQAAKHEGPLHKCDISNSTEAGQKLFNMLRLGKSEPWTLALENVVGAKNMNVRPLLNYFEPLFTWLKDQNKNSFVGWSTDWSPYADQSIKVRISLKSALGDKAYEWNDNEMYLFRCSVAYAMRQYFLKVKNQMILFGEEDVRVANLKPRISFNFFVTAPKNVSDIIPRTEVEKAIRMSRSRINDAFRLNDNSLEFLGIQPTLGPPNQPPVS

SEQ ID NO: 58 - protein, 944 aa, artificial
  ACE2 18-732 S645C with IgG4 wt
QSTIEEQAKTFLDKFNHEAEDLFYQSSLASWNYNTNITEENVQNMNNAGDKWSAFLKEQSTLAQMYPLQEIQNLTVKLQLQALQQNGSSVLSEDKSKRLNTILNTMSTIYSTGKVCNPDNPQECLLLEPGLNEIMANSLDYNERLWAWESWRSEVGKQLRPLYEEYVVLKNEMARANHYEDYGDYWRGDYEVNGVDGYDYSRGQLIEDVEHTFEEIKPLYEHLHAYVRAKLMNAYPSYISPIGCLPAHLLGDMWGRFWTNLYSLTVPFGQKPNIDVTDAMVDQAWDAQRIFKEAEKFFVSVGLPNMTQGFWENSMLTDPGNVQKAVCHPTAWDLGKGDFRILMCTKVTMDDFLTAHHEMGHIQYDMAYAAQPFLLRNGANEGFHEAVGEIMSLSAATPKHLKSIGLLSPDFQEDNETEINFLLKQALTIVGTLPFTYMLEKWRWMVFKGEIPKDQWMKKWWEMKREIVGVVEPVPHDETYCDPASLFHVSNDYSFIRYYTRTLYQFQFQEALCQAAKHEGPLHKCDISNSTEAGQKLFNMLRLGKSEPWTLALENVVGAKNMNVRPLLNYFEPLFTWLKDQNKNSFVGWSTDWSPYADQSIKVRISLKSALGDKAYEWNDNEMYLFRCSVAYAMRQYFLKVKNQMILFGEEDVRVANLKPRISFNFFVTAPKNVSDIIPRTEVEKAIRMSRSRINDAFRLNDNSLEFLGIQPTLGESKYGPPCPPCPAPEFLGGPSVFLFPPKPKDTLMISRTPEVTCVVVDVSQEDPEVQFNWYVDGVEVHNAKTKPREEQFNSTYRVVSVLTVLHQDWLNGKEYKCKVSNKGLPSSIEKTISKAKGQPREPQVYTLPPSQEEMTKNQVSLTCLVKGFYPSDIAVEWESNGQPENNYKTTPPVLDSDGSFFLYSRLTVDKSRWQEGNVFSCSVMHEALHNHYTQKSLSLSLGK

SEQ ID NO: 59 - protein, 942 aa, artificial
  ACE2 18-732 S645C with IgG1 wt
QSTIEEQAKTFLDKFNHEAEDLFYQSSLASWNYNTNITEENVQNMNNAGDKWSAFLKEQSTLAQMYPLQEIQNLTVKLQLQALQQNGSSVLSEDKSKRLNTILNTMSTIYSTGKVCNPDNPQECLLLEPGLNEIMANSLDYNERLWAWESWRSEVGKQLRPLYEEYVVLKNEMARANHYEDYGDYWRGDYEVNGVDGYDYSRGQLIEDVEHTFEEIKPLYEHLHAYVRAKLMNAYPSYISPIGCLPAHLLGDMWGRFWTNLYSLTVPFGQKPNIDVTDAMVDQAWDAQRIFKEAEKFFVSVGLPNMTQGFWENSMLTDPGNVQKAVCHPTAWDLGKGDFRILMCTKVTMDDFLTAHHEMGHIQYDMAYAAQPFLLRNGANEGFHEAVGEIMSLSAATPKHLKSIGLLSPDFQEDNETEINFLLKQALTIVGTLPFTYMLEKWRWMVFKGEIPKDQWMKKWWEMKREIVGVVEPVPHDETYCDPASLFHVSNDYSFIRYYTRTLYQFQFQEALCQAAKHEGPLHKCDISNSTEAGQKLFNMLRLGKSEPWTLALENVVGAKNMNVRPLLNYFEPLFTWLKDQNKNSFVGWSTDWSPYADQSIKVRISLKSALGDKAYEWNDNEMYLFRCSVAYAMRQYFLKVKNQMILFGEEDVRVANLKPRISFNFFVTAPKNVSDIIPRTEVEKAIRMSRSRINDAFRLNDNSLEFLGIQPTLGDKTHTCPPCPAPELLGGPSVFLFPPKPKDTLMISRTPEVTCVVVDVSHEDPEVKFNWYVDGVEVHNAKTKPREEQYNSTYRVVSVLTVLHQDWLNGKEYKCKVSNKALPAPIEKTISKAKGQPREPQVYTLPPSRDELTKNQVSLTCLVKGFYPSDIAVEWESNGQPENNYKTTPPVLDSDGSFFLYSKLTVDKSRWQQGNVFSCSVMHEALHNHYTQKSLSLSPGK

SEQ ID NO: 60 - protein, 952 aa, artificial
  ACE2 18-740 S645C with IgG4 wt
QSTIEEQAKTFLDKFNHEAEDLFYQSSLASWNYNTNITEENVQNMNNAGDKWSAFLKEQSTLAQMYPLQEIQNLTVKLQLQALQQNGSSVLSEDKSKRLNTILNTMSTIYSTGKVCNPDNPQECLLLEPGLNEIMANSLDYNERLWAWESWRSEVGKQLRPLYEEYVVLKNEMARANHYEDYGDYWRGDYEVNGVDGYDYSRGQLIEDVEHTFEEIKPLYEHLHAYVRAKLMNAYPSYISPIGCLPAHLLGDMWGRFWTNLYSLTVPFGQKPNIDVTDAMVDQAWDAQRIFKEAEKFFVSVGLPNMTQGFWENSMLTDPGNVQKAVCHPTAWDLGKGDFRILMCTKVTMDDFLTAHHEMGHIQYDMAYAAQPFLLRNGANEGFHEAVGEIMSLSAATPKHLKSIGLLSPDFQEDNETEINFLLKQALTIVGTLPFTYMLEKWRWMVFKGEIPKDQWMKKWWEMKREIVGVVEPVPHDETYCDPASLFHVSNDYSFIRYYTRTLYQFQFQEALCQAAKHEGPLHKCDISNSTEAGQKLFNMLRLGKSEPWTLALENVVGAKNMNVRPLLNYFEPLFTWLKDQNKNSFVGWSTDWSPYADQSIKVRISLKSALGDKAYEWNDNEMYLFRCSVAYAMRQYFLKVKNQMILFGEEDVRVANLKPRISFNFFVTAPKNVSDIIPRTEVEKAIRMSRSRINDAFRLNDNSLEFLGIQPTLGPPNQPPVSESKYGPPCPPCPAPEFLGGPSVFLFPPKPKDTLMISRTPEVTCVVVDVSQEDPEVQFNWYVDGVEVHNAKTKPREEQFNSTYRVVSVLTVLHQDWLNGKEYKCKVSNKGLPSSIEKTISKAKGQPREPQVYTLPPSQEEMTKNQVSLTCLVKGFYPSDIAVEWESNGQPENNYKTTPPVLDSDGSFFLYSRLTVDKSRWQEGNVFSCSVMHEALHNHYTQKSLSLSLGK

SEQ ID NO: 61 - protein, 950 aa, artificial
  ACE2 18-740 S645C with IgG1 wt
QSTIEEQAKTFLDKFNHEAEDLFYQSSLASWNYNTNITEENVQNMNNAGDKWSAFLKEQSTLAQMYPLQEIQNLTVKLQLQALQQNGSSVLSEDKSKRLNTILNTMSTIYSTGKVCNPDNPQECLLLEPGLNEIMANSLDYNERLWAWESWRSEVGKQLRPLYEEYVVLKNEMARANHYEDYGDYWRGDYEVNGVDGYDYSRGQLIEDVEHTFEEIKPLYEHLHAYVRAKLMNAYPSYISPIGCLPAHLLGDMWGRFWTNLYSLTVPFGQKPNIDVTDAMVDQAWDAQRIFKEAEKFFVSVGLPNMTQGFWENSMLTDPGNVQKAVCHPTAWDLGKGDFRILMCTKVTMDDFLTAHHEMGHIQYDMAYAAQPFLLRNGANEGFHEAVGEIMSLSAATPKHLKSIGLLSPDFQEDNETEINFLLKQALTIVGTLPFTYMLEKWRWMVFKGEIPKDQWMKKWWEMKREIVGVVEPVPHDETYCDPASLFHVSNDYSFIRYYTRTLYQFQFQEALCQAAKHEGPLHKCDISNSTEAGQKLFNMLRLGKSEPWTLALENVVGAKNMNVRPLLNYFEPLFTWLKDQNKNSFVGWSTDWSPYADQSIKVRISLKSALGDKAYEWNDNEMYLFRCSVAYAMRQYFLKVKNQMILFGEEDVRVANLKPRISFNFFVTAPKNVSDIIPRTEVEKAIRMSRSRINDAFRLNDNSLEFLGIQPTLGPPNQPPVSDKTHTCPPCPAPELLGGPSVFLFPPKPKDTLMISRTPEVTCVVVDVSHEDPEVKFNWYVDGVEVHNAKTKPREEQYNSTYRVVSVLTVLHQDWLNGKEYKCKVSNKALPAPIEKTISKAKGQPREPQVYTLPPSRDELTKNQVSLTCLVKGFYPSDIAVEWESNGQPENNYKTTPPVLDSDGSFFLYSKLTVDKSRWQQGNVFSCSVMHEALHNHYTQKSLSLSPGK

SEQ ID NO: 62 - protein, 944 aa, artificial
  ACE2 18-732 S645C with IgG4 YTE
QSTIEEQAKTFLDKFNHEAEDLFYQSSLASWNYNTNITEENVQNMNNAGDKWSAFLKEQSTLAQMYPLQEIQNLTVKLQLQALQQNGSSVLSEDKSKRLNTILNTMSTIYSTGKVCNPDNPQECLLLEPGLNEIMANSLDYNERLWAWESWRSEVGKQLRPLYEEYVVLKNEMARANHYEDYGDYWRGDYEVNGVDGYDYSRGQLIEDVEHTFEEIKPLYEHLHAYVRAKLMNAYPSYISPIGCLPAHLLGDMWGRFWTNLYSLTVPFGQKPNIDVTDAMVDQAWDAQRIFKEAEKFFVSVGLPNMTQGFWENSMLTDPGNVQKAVCHPTAWDLGKGDFRILMCTKVTMDDFLTAHHEMGHIQYDMAYAAQPFLLRNGANEGFHEAVGEIMSLSAATPKHLKSIGLLSPDFQEDNETEINFLLKQALTIVGTLPFTYMLEKWRWMVFKGEIPKDQWMKKWWEMKREIVGVVEPVPHDETYCDPASLFHVSNDYSFIRYYTRTLYQFQFQEALCQAAKHEGPLHKCDISNSTEAGQKLFNMLRLGKSEPWTLALENVVGAKNMNVRPLLNYFEPLFTWLKDQNKNSFVGWSTDWSPYADQSIKVRISLKSALGDKAYEWNDNEMYLFRCSVAYAMRQYFLKVKNQMILFGEEDVRVANLKPRISFNFFVTAPKNVSDIIPRTEVEKAIRMSRSRINDAFRLNDNSLEFLGIQPTLGESKYGPPCPPCPAPEFLGGPSVFLFPPKPKDTLYITREPEVTCVVVDVSQEDPEVQFNWYVDGVEVHNAKTKPREEQFNSTYRVVSVLTVLHQDWLNGKEYKCKVSNKGLPSSIEKTISKAKGQPREPQVYTLPPSQEEMTKNQVSLTCLVKGFYPSDIAVEWESNGQPENNYKTTPPVLDSDGSFFLYSRLTVDKSRWQEGNVFSCSVMHEALHNHYTQKSLSLSLGK

SEQ ID NO: 63 - protein, 942 aa, artificial
  ACE2 18-732 S645C with IgG1 YTE
QSTIEEQAKTFLDKFNHEAEDLFYQSSLASWNYNTNITEENVQNMNNAGDKWSAFLKEQSTLAQMYPLQEIQNLTVKLQLQALQQNGSSVLSEDKSKRLNTILNTMSTIYSTGKVCNPDNPQECLLLEPGLNEIMANSLDYNERLWAWESWRSEVGKQLRPLYEEYVVLKNEMARANHYEDYGDYWRGDYEVNGVDGYDYSRGQLIEDVEHTFEEIKPLYEHLHAYVRAKLMNAYPSYISPIGCLPAHLLGDMWGRFWTNLYSLTVPFGQKPNIDVTDAMVDQAWDAQRIFKEAEKFFVSVGLPNMTQGFWENSMLTDPGNVQKAVCHPTAWDLGKGDFRILMCTKVTMDDFLTAHHEMGHIQYDMAYAAQPFLLRNGANEGFHEAVGEIMSLSAATPKHLKSIGLLSPDFQEDNETEINFLLKQALTIVGTLPFTYMLEKWRWMVFKGEIPKDQWMKKWWEMKREIVGVVEPVPHDETYCDPASLFHVSNDYSFIRYYTRTLYQFQFQEALCQAAKHEGPLHKCDISNSTEAGQKLFNMLRLGKSEPWTLALENVVGAKNMNVRPLLNYFEPLFTWLKDQNKNSFVGWSTDWSPYADQSIKVRISLKSALGDKAYEWNDNEMYLFRCSVAYAMRQYFLKVKNQMILFGEEDVRVANLKPRISFNFFVTAPKNVSDIIPRTEVEKAIRMSRSRINDAFRLNDNSLEFLGIQPTLGDKTHTCPPCPAPELLGGPSVFLFPPKPKDTLYITREPEVTCVVVDVSHEDPEVKFNWYVDGVEVHNAKTKPREEQYNSTYRVVSVLTVLHQDWLNGKEYKCKVSNKALPAPIEKTISKAKGQPREPQVYTLPPSRDELTKNQVSLTCLVKGFYPSDIAVEWESNGQPENNYKTTPPVLDSDGSFFLYSKLTVDKSRWQQGNVFSCSVMHEALHNHYTQKSLSLSPGK

SEQ ID NO: 64 - protein, 944 aa, artificial
  ACE2 18-732 S645C with IgG4 T256D T307Q
QSTIEEQAKTFLDKFNHEAEDLFYQSSLASWNYNTNITEENVQNMNNAGDKWSAFLKEQSTLAQMYPLQEIQNLTVKLQLQALQQNGSSVLSEDKSKRLNTILNTMSTIYSTGKVCNPDNPQECLLLEPGLNEIMANSLDYNERLWAWESWRSEVGKQLRPLYEEYVVLKNEMARANHYEDYGDYWRGDYEVNGVDGYDYSRGQLIEDVEHTFEEIKPLYEHLHAYVRAKLMNAYPSYISPIGCLPAHLLGDMWGRFWTNLYSLTVPFGQKPNIDVTDAMVDQAWDAQRIFKEAEKFFVSVGLPNMTQGFWENSMLTDPGNVQKAVCHPTAWDLGKGDFRILMCTKVTMDDFLTAHHEMGHIQYDMAYAAQPFLLRNGANEGFHEAVGEIMSLSAATPKHLKSIGLLSPDFQEDNETEINFLLKQALTIVGTLPFTYMLEKWRWMVFKGEIPKDQWMKKWWEMKREIVGVVEPVPHDETYCDPASLFHVSNDYSFIRYYTRTLYQFQFQEALCQAAKHEGPLHKCDISNSTEAGQKLFNMLRLGKSEPWTLALENVVGAKNMNVRPLLNYFEPLFTWLKDQNKNSFVGWSTDWSPYADQSIKVRISLKSALGDKAYEWNDNEMYLFRCSVAYAMRQYFLKVKNQMILFGEEDVRVANLKPRISFNFFVTAPKNVSDIIPRTEVEKAIRMSRSRINDAFRLNDNSLEFLGIQPTLGESKYGPPCPPCPAPEFLGGPSVFLFPPKPKDTLMISRDPEVTCVVVDVSQEDPEVQFNWYVDGVEVHNAKTKPREEQFNSTYRVVSVLQVLHQDWLNGKEYKCKVSNKGLPSSIEKTISKAKGQPREPQVYTLPPSQEEMTKNQVSLTCLVKGFYPSDIAVEWESNGQPENNYKTTPPVLDSDGSFFLYSRLTVDKSRWQEGNVFSCSVMHEALHNHYTQKSLSLSLGK

SEQ ID NO: 65 - protein, 942 aa, artificial
  ACE2 18-732 S645C with IgG1 T256D T 307Q
QSTIEEQAKTFLDKFNHEAEDLFYQSSLASWNYNTNITEENVQNMNNAGDKWSAFLKEQSTLAQMYPLQEIQNLTVKLQLQALQQNGSSVLSEDKSKRLNTILNTMSTIYSTGKVCNPDNPQECLLLEPGLNEIMANSLDYNERLWAWESWRSEVGKQLRPLYEEYVVLKNEMARANHYEDYGDYWRGDYEVNGVDGYDYSRGQLIEDVEHTFEEIKPLYEHLHAYVRAKLMNAYPSYISPIGCLPAHLLGDMWGRFWTNLYSLTVPFGQKPNIDVTDAMVDQAWDAQRIFKEAEKFFVSVGLPNMTQGFWENSMLTDPGNVQKAVCHPTAWDLGKGDFRILMCTKVTMDDFLTAHHEMGHIQYDMAYAAQPFLLRNGANEGFHEAVGEIMSLSAATPKHLKSIGLLSPDFQEDNETEINFLLKQALTIVGTLPFTYMLEKWRWMVFKGEIPKDQWMKKWWEMKREIVGVVEPVPHDETYCDPASLFHVSNDYSFIRYYTRTLYQFQFQEALCQAAKHEGPLHKCDISNSTEAGQKLFNMLRLGKSEPWTLALENVVGAKNMNVRPLLNYFEPLFTWLKDQNKNSFVGWSTDWSPYADQSIKVRISLKSALGDKAYEWNDNEMYLFRCSVAYAMRQYFLKVKNQMILFGEEDVRVANLKPRISFNFFVTAPKNVSDIIPRTEVEKAIRMSRSRINDAFRLNDNSLEFLGIQPTLGDKTHTCPPCPAPELLGGPSVFLFPPKPKDTLMISRDPEVTCVVVDVSHEDPEVKFNWYVDGVEVHNAKTKPREEQYNSTYRVVSVLQVLHQDWLNGKEYKCKVSNKALPAPIEKTISKAKGQPREPQVYTLPPSRDELTKNQVSLTCLVKGFYPSDIAVEWESNGQPENNYKTTPPVLDSDGSFFLYSKLTVDKSRWQQGNVFSCSVMHEALHNHYTQKSLSLSPGK

SEQ ID NO: 66 - protein, 952 aa, artificial
  ACE2 18-740 S645C with IgG4 YTE
QSTIEEQAKTFLDKFNHEAEDLFYQSSLASWNYNTNITEENVQNMNNAGDKWSAFLKEQSTLAQMYPLQEIQNLTVKLQLQALQQNGSSVLSEDKSKRLNTILNTMSTIYSTGKVCNPDNPQECLLLEPGLNEIMANSLDYNERLWAWESWRSEVGKQLRPLYEEYVVLKNEMARANHYEDYGDYWRGDYEVNGVDGYDYSRGQLIEDVEHTFEEIKPLYEHLHAYVRAKLMNAYPSYISPIGCLPAHLLGDMWGRFWTNLYSLTVPFGQKPNIDVTDAMVDQAWDAQRIFKEAEKFFVSVGLPNMTQGFWENSMLTDPGNVQKAVCHPTAWDLGKGDFRILMCTKVTMDDFLTAHHEMGHIQYDMAYAAQPFLLRNGANEGFHEAVGEIMSLSAATPKHLKSIGLLSPDFQEDNETEINFLLKQALTIVGTLPFTYMLEKWRWMVFKGEIPKDQWMKKWWEMKREIVGVVEPVPHDETYCDPASLFHVSNDYSFIRYYTRTLYQFQFQEALCQAAKHEGPLHKCDISNSTEAGQKLFNMLRLGKSEPWTLALENVVGAKNMNVRPLLNYFEPLFTWLKDQNKNSFVGWSTDWSPYADQSIKVRISLKSALGDKAYEWNDNEMYLFRCSVAYAMRQYFLKVKNQMILFGEEDVRVANLKPRISFNFFVTAPKNVSDIIPRTEVEKAIRMSRSRINDAFRLNDNSLEFLGIQPTLGPPNQPPVSESKYGPPCPPCPAPEFLGGPSVFLFPPKPKDTLYITREPEVTCVVVDVSQEDPEVQFNWYVDGVEVHNAKTKPREEQFNSTYRVVSVLTVLHQDWLNGKEYKCKVSNKGLPSSIEKTISKAKGQPREPQVYTLPPSQEEMTKNQVSLTCLVKGFYPSDIAVEWESNGQPENNYKTTPPVLDSDGSFFLYSRLTVDKSRWQEGNVFSCSVMHEALHNHYTQKSLSLSLGK

SEQ ID NO: 67 - protein, 950 aa, artificial
  ACE2 18-740 S645C with IgG1 YTE
QSTIEEQAKTFLDKFNHEAEDLFYQSSLASWNYNTNITEENVQNMNNAGDKWSAFLKEQSTLAQMYPLQEIQNLTVKLQLQALQQNGSSVLSEDKSKRLNTILNTMSTIYSTGKVCNPDNPQECLLLEPGLNEIMANSLDYNERLWAWESWRSEVGKQLRPLYEEYVVLKNEMARANHYEDYGDYWRGDYEVNGVDGYDYSRGQLIEDVEHTFEEIKPLYEHLHAYVRAKLMNAYPSYISPIGCLPAHLLGDMWGRFWTNLYSLTVPFGQKPNIDVTDAMVDQAWDAQRIFKEAEKFFVSVGLPNMTQGFWENSMLTDPGNVQKAVCHPTAWDLGKGDFRILMCTKVTMDDFLTAHHEMGHIQYDMAYAAQPFLLRNGANEGFHEAVGEIMSLSAATPKHLKSIGLLSPDFQEDNETEINFLLKQALTIVGTLPFTYMLEKWRWMVFKGEIPKDQWMKKWWEMKREIVGVVEPVPHDETYCDPASLFHVSNDYSFIRYYTRTLYQFQFQEALCQAAKHEGPLHKCDISNSTEAGQKLFNMLRLGKSEPWTLALENVVGAKNMNVRPLLNYFEPLFTWLKDQNKNSFVGWSTDWSPYADQSIKVRISLKSALGDKAYEWNDNEMYLFRCSVAYAMRQYFLKVKNQMILFGEEDVRVANLKPRISFNFFVTAPKNVSDIIPRTEVEKAIRMSRSRINDAFRLNDNSLEFLGIQPTLGPPNQPPVSDKTHTCPPCPAPELLGGPSVFLFPPKPKDTLYITREPEVTCVVVDVSHEDPEVKFNWYVDGVEVHNAKTKPREEQYNSTYRVVSVLTVLHQDWLNGKEYKCKVSNKALPAPIEKTISKAKGQPREPQVYTLPPSRDELTKNQVSLTCLVKGFYPSDIAVEWESNGQPENNYKTTPPVLDSDGSFFLYSKLTVDKSRWQQGNVFSCSVMHEALHNHYTQKSLSLSPGK

SEQ ID NO: 68 - protein, 952 aa, artificial
  ACE2 18-740 S645C with IgG4 T256D T307Q
QSTIEEQAKTFLDKFNHEAEDLFYQSSLASWNYNTNITEENVQNMNNAGDKWSAFLKEQSTLAQMYPLQEIQNLTVKLQLQALQQNGSSVLSEDKSKRLNTILNTMSTIYSTGKVCNPDNPQECLLLEPGLNEIMANSLDYNERLWAWESWRSEVGKQLRPLYEEYVVLKNEMARANHYEDYGDYWRGDYEVNGVDGYDYSRGQLIEDVEHTFEEIKPLYEHLHAYVRAKLMNAYPSYISPIGCLPAHLLGDMWGRFWTNLYSLTVPFGQKPNIDVTDAMVDQAWDAQRIFKEAEKFFVSVGLPNMTQGFWENSMLTDPGNVQKAVCHPTAWDLGKGDFRILMCTKVTMDDFLTAHHEMGHIQYDMAYAAQPFLLRNGANEGFHEAVGEIMSLSAATPKHLKSIGLLSPDFQEDNETEINFLLKQALTIVGTLPFTYMLEKWRWMVFKGEIPKDQWMKKWWEMKREIVGVVEPVPHDETYCDPASLFHVSNDYSFIRYYTRTLYQFQFQEALCQAAKHEGPLHKCDISNSTEAGQKLFNMLRLGKSEPWTLALENVVGAKNMNVRPLLNYFEPLFTWLKDQNKNSFVGWSTDWSPYADQSIKVRISLKSALGDKAYEWNDNEMYLFRCSVAYAMRQYFLKVKNQMILFGEEDVRVANLKPRISFNFFVTAPKNVSDIIPRTEVEKAIRMSRSRINDAFRLNDNSLEFLGIQPTLGPPNQPPVSESKYGPPCPPCPAPEFLGGPSVFLFPPKPKDTLMISRDPEVTCVVVDVSQEDPEVQFNWYVDGVEVHNAKTKPREEQFNSTYRVVSVLQVLHQDWLNGKEYKCKVSNKGLPSSIEKTISKAKGQPREPQVYTLPPSQEEMTKNQVSLTCLVKGFYPSDIAVEWESNGQPENNYKTTPPVLDSDGSFFLYSRLTVDKSRWQEGNVFSCSVMHEALHNHYTQKSLSLSLGK

SEQ ID NO: 69 - protein, 950 aa, artificial
  ACE2 18-740 S645C with IgG1 T256D T307Q
QSTIEEQAKTFLDKFNHEAEDLFYQSSLASWNYNTNITEENVQNMNNAGDKWSAFLKEQSTLAQMYPLQEIQNLTVKLQLQALQQNGSSVLSEDKSKRLNTILNTMSTIYSTGKVCNPDNPQECLLLEPGLNEIMANSLDYNERLWAWESWRSEVGKQLRPLYEEYVVLKNEMARANHYEDYGDYWRGDYEVNGVDGYDYSRGQLIEDVEHTFEEIKPLYEHLHAYVRAKLMNAYPSYISPIGCLPAHLLGDMWGRFWTNLYSLTVPFGQKPNIDVTDAMVDQAWDAQRIFKEAEKFFVSVGLPNMTQGFWENSMLTDPGNVQKAVCHPTAWDLGKGDFRILMCTKVTMDDFLTAHHEMGHIQYDMAYAAQPFLLRNGANEGFHEAVGEIMSLSAATPKHLKSIGLLSPDFQEDNETEINFLLKQALTIVGTLPFTYMLEKWRWMVFKGEIPKDQWMKKWWEMKREIVGVVEPVPHDETYCDPASLFHVSNDYSFIRYYTRTLYQFQFQEALCQAAKHEGPLHKCDISNSTEAGQKLFNMLRLGKSEPWTLALENVVGAKNMNVRPLLNYFEPLFTWLKDQNKNSFVGWSTDWSPYADQSIKVRISLKSALGDKAYEWNDNEMYLFRCSVAYAMRQYFLKVKNQMILFGEEDVRVANLKPRISFNFFVTAPKNVSDIIPRTEVEKAIRMSRSRINDAFRLNDNSLEFLGIQPTLGPPNQPPVSDKTHTCPPCPAPELLGGPSVFLFPPKPKDTLMISRDPEVTCVVVDVSHEDPEVKFNWYVDGVEVHNAKTKPREEQYNSTYRVVSVLQVLHQDWLNGKEYKCKVSNKALPAPIEKTISKAKGQPREPQVYTLPPSRDELTKNQVSLTCLVKGFYPSDIAVEWESNGQPENNYKTTPPVLDSDGSFFLYSKLTVDKSRWQQGNVFSCSVMHEALHNHYTQKSLSLSPGK

SEQ ID NO: 70 - protein, 715 aa, artificial
  ACE2 18-732 S645C+H374N+H378N
QSTIEEQAKTFLDKFNHEAEDLFYQSSLASWNYNTNITEENVQNMNNAGDKWSAFLKEQSTLAQMYPLQEIQNLTVKLQLQALQQNGSSVLSEDKSKRLNTILNTMSTIYSTGKVCNPDNPQECLLLEPGLNEIMANSLDYNERLWAWESWRSEVGKQLRPLYEEYVVLKNEMARANHYEDYGDYWRGDYEVNGVDGYDYSRGQLIEDVEHTFEEIKPLYEHLHAYVRAKLMNAYPSYISPIGCLPAHLLGDMWGRFWTNLYSLTVPFGQKPNIDVTDAMVDQAWDAQRIFKEAEKFFVSVGLPNMTQGFWENSMLTDPGNVQKAVCHPTAWDLGKGDFRILMCTKVTMDDFLTAHNEMGNIQYDMAYAAQPFLLRNGANEGFHEAVGEIMSLSAATPKHLKSIGLLSPDFQEDNETEINFLLKQALTIVGTLPFTYMLEKWRWMVFKGEIPKDQWMKKWWEMKREIVGVVEPVPHDETYCDPASLFHVSNDYSFIRYYTRTLYQFQFQEALCQAAKHEGPLHKCDISNSTEAGQKLFNMLRLGKSEPWTLALENVVGAKNMNVRPLLNYFEPLFTWLKDQNKNSFVGWSTDWSPYADQSIKVRISLKSALGDKAYEWNDNEMYLFRCSVAYAMRQYFLKVKNQMILFGEEDVRVANLKPRISFNFFVTAPKNVSDIIPRTEVEKAIRMSRSRINDAFRLNDNSLEFLGIQPTLG

SEQ ID NO: 71 - protein, 723 aa, artificial
  ACE2 18-740 S645C+H374N+H378N
QSTIEEQAKTFLDKFNHEAEDLFYQSSLASWNYNTNITEENVQNMNNAGDKWSAFLKEQSTLAQMYPLQEIQNLTVKLQLQALQQNGSSVLSEDKSKRLNTILNTMSTIYSTGKVCNPDNPQECLLLEPGLNEIMANSLDYNERLWAWESWRSEVGKQLRPLYEEYVVLKNEMARANHYEDYGDYWRGDYEVNGVDGYDYSRGQLIEDVEHTFEEIKPLYEHLHAYVRAKLMNAYPSYISPIGCLPAHLLGDMWGRFWTNLYSLTVPFGQKPNIDVTDAMVDQAWDAQRIFKEAEKFFVSVGLPNMTQGFWENSMLTDPGNVQKAVCHPTAWDLGKGDFRILMCTKVTMDDFLTAHNEMGNIQYDMAYAAQPFLLRNGANEGFHEAVGEIMSLSAATPKHLKSIGLLSPDFQEDNETEINFLLKQALTIVGTLPFTYMLEKWRWMVFKGEIPKDQWMKKWWEMKREIVGVVEPVPHDETYCDPASLFHVSNDYSFIRYYTRTLYQFQFQEALCQAAKHEGPLHKCDISNSTEAGQKLFNMLRLGKSEPWTLALENVVGAKNMNVRPLLNYFEPLFTWLKDQNKNSFVGWSTDWSPYADQSIKVRISLKSALGDKAYEWNDNEMYLFRCSVAYAMRQYFLKVKNQMILFGEEDVRVANLKPRISFNFFVTAPKNVSDIIPRTEVEKAIRMSRSRINDAFRLNDNSLEFLGIQPTLGPPNQPPVS

SEQ ID NO: 72 - protein, 944 aa, artificial
  ACE2 18-732 S645C H374N H378N with IgG4 wt
QSTIEEQAKTFLDKFNHEAEDLFYQSSLASWNYNTNITEENVQNMNNAGDKWSAFLKEQSTLAQMYPLQEIQNLTVKLQLQALQQNGSSVLSEDKSKRLNTILNTMSTIYSTGKVCNPDNPQECLLLEPGLNEIMANSLDYNERLWAWESWRSEVGKQLRPLYEEYVVLKNEMARANHYEDYGDYWRGDYEVNGVDGYDYSRGQLIEDVEHTFEEIKPLYEHLHAYVRAKLMNAYPSYISPIGCLPAHLLGDMWGRFWTNLYSLTVPFGQKPNIDVTDAMVDQAWDAQRIFKEAEKFFVSVGLPNMTQGFWENSMLTDPGNVQKAVCHPTAWDLGKGDFRILMCTKVTMDDFLTAHNEMGNIQYDMAYAAQPFLLRNGANEGFHEAVGEIMSLSAATPKHLKSIGLLSPDFQEDNETEINFLLKQALTIVGTLPFTYMLEKWRWMVFKGEIPKDQWMKKWWEMKREIVGVVEPVPHDETYCDPASLFHVSNDYSFIRYYTRTLYQFQFQEALCQAAKHEGPLHKCDISNSTEAGQKLFNMLRLGKSEPWTLALENVVGAKNMNVRPLLNYFEPLFTWLKDQNKNSFVGWSTDWSPYADQSIKVRISLKSALGDKAYEWNDNEMYLFRCSVAYAMRQYFLKVKNQMILFGEEDVRVANLKPRISFNFFVTAPKNVSDIIPRTEVEKAIRMSRSRINDAFRLNDNSLEFLGIQPTLGESKYGPPCPPCPAPEFLGGPSVFLFPPKPKDTLMISRTPEVTCVVVDVSQEDPEVQFNWYVDGVEVHNAKTKPREEQFNSTYRVVSVLTVLHQDWLNGKEYKCKVSNKGLPSSIEKTISKAKGQPREPQVYTLPPSQEEMTKNQVSLTCLVKGFYPSDIAVEWESNGQPENNYKTTPPVLDSDGSFFLYSRLTVDKSRWQEGNVFSCSVMHEALHNHYTQKSLSLSLGK

SEQ ID NO: 73 - protein, 942 aa, artificial
  ACE2 18-732 S645C H374N H378N with IgG1 wt
QSTIEEQAKTFLDKFNHEAEDLFYQSSLASWNYNTNITEENVQNMNNAGDKWSAFLKEQSTLAQMYPLQEIQNLTVKLQLQALQQNGSSVLSEDKSKRLNTILNTMSTIYSTGKVCNPDNPQECLLLEPGLNEIMANSLDYNERLWAWESWRSEVGKQLRPLYEEYVVLKNEMARANHYEDYGDYWRGDYEVNGVDGYDYSRGQLIEDVEHTFEEIKPLYEHLHAYVRAKLMNAYPSYISPIGCLPAHLLGDMWGRFWTNLYSLTVPFGQKPNIDVTDAMVDQAWDAQRIFKEAEKFFVSVGLPNMTQGFWENSMLTDPGNVQKAVCHPTAWDLGKGDFRILMCTKVTMDDFLTAHNEMGNIQYDMAYAAQPFLLRNGANEGFHEAVGEIMSLSAATPKHLKSIGLLSPDFQEDNETEINFLLKQALTIVGTLPFTYMLEKWRWMVFKGEIPKDQWMKKWWEMKREIVGVVEPVPHDETYCDPASLFHVSNDYSFIRYYTRTLYQFQFQEALCQAAKHEGPLHKCDISNSTEAGQKLFNMLRLGKSEPWTLALENVVGAKNMNVRPLLNYFEPLFTWLKDQNKNSFVGWSTDWSPYADQSIKVRISLKSALGDKAYEWNDNEMYLFRCSVAYAMRQYFLKVKNQMILFGEEDVRVANLKPRISFNFFVTAPKNVSDIIPRTEVEKAIRMSRSRINDAFRLNDNSLEFLGIQPTLGDKTHTCPPCPAPELLGGPSVFLFPPKPKDTLMISRTPEVTCVVVDVSHEDPEVKFNWYVDGVEVHNAKTKPREEQYNSTYRVVSVLTVLHQDWLNGKEYKCKVSNKALPAPIEKTISKAKGQPREPQVYTLPPSRDELTKNQVSLTCLVKGFYPSDIAVEWESNGQPENNYKTTPPVLDSDGSFFLYSKLTVDKSRWQQGNVFSCSVMHEALHNHYTQKSLSLSPGK

SEQ ID NO: 74 - protein, 952 aa, artificial
  ACE2 18-740 S645C H374N H378N with IgG4 wt
QSTIEEQAKTFLDKFNHEAEDLFYQSSLASWNYNTNITEENVQNMNNAGDKWSAFLKEQSTLAQMYPLQEIQNLTVKLQLQALQQNGSSVLSEDKSKRLNTILNTMSTIYSTGKVCNPDNPQECLLLEPGLNEIMANSLDYNERLWAWESWRSEVGKQLRPLYEEYVVLKNEMARANHYEDYGDYWRGDYEVNGVDGYDYSRGQLIEDVEHTFEEIKPLYEHLHAYVRAKLMNAYPSYISPIGCLPAHLLGDMWGRFWTNLYSLTVPFGQKPNIDVTDAMVDQAWDAQRIFKEAEKFFVSVGLPNMTQGFWENSMLTDPGNVQKAVCHPTAWDLGKGDFRILMCTKVTMDDFLTAHNEMGNIQYDMAYAAQPFLLRNGANEGFHEAVGEIMSLSAATPKHLKSIGLLSPDFQEDNETEINFLLKQALTIVGTLPFTYMLEKWRWMVFKGEIPKDQWMKKWWEMKREIVGVVEPVPHDETYCDPASLFHVSNDYSFIRYYTRTLYQFQFQEALCQAAKHEGPLHKCDISNSTEAGQKLFNMLRLGKSEPWTLALENVVGAKNMNVRPLLNYFEPLFTWLKDQNKNSFVGWSTDWSPYADQSIKVRISLKSALGDKAYEWNDNEMYLFRCSVAYAMRQYFLKVKNQMILFGEEDVRVANLKPRISFNFFVTAPKNVSDIIPRTEVEKAIRMSRSRINDAFRLNDNSLEFLGIQPTLGPPNQPPVSESKYGPPCPPCPAPEFLGGPSVFLFPPKPKDTLMISRTPEVTCVVVDVSQEDPEVQFNWYVDGVEVHNAKTKPREEQFNSTYRVVSVLTVLHQDWLNGKEYKCKVSNKGLPSSIEKTISKAKGQPREPQVYTLPPSQEEMTKNQVSLTCLVKGFYPSDIAVEWESNGQPENNYKTTPPVLDSDGSFFLYSRLTVDKSRWQEGNVFSCSVMHEALHNHYTQKSLSLSLGK

SEQ ID NO: 75 - protein, 950 aa, artificial
  ACE2 18-740 S645C H374N H378N with IgG1 wt
QSTIEEQAKTFLDKFNHEAEDLFYQSSLASWNYNTNITEENVQNMNNAGDKWSAFLKEQSTLAQMYPLQEIQNLTVKLQLQALQQNGSSVLSEDKSKRLNTILNTMSTIYSTGKVCNPDNPQECLLLEPGLNEIMANSLDYNERLWAWESWRSEVGKQLRPLYEEYVVLKNEMARANHYEDYGDYWRGDYEVNGVDGYDYSRGQLIEDVEHTFEEIKPLYEHLHAYVRAKLMNAYPSYISPIGCLPAHLLGDMWGRFWTNLYSLTVPFGQKPNIDVTDAMVDQAWDAQRIFKEAEKFFVSVGLPNMTQGFWENSMLTDPGNVQKAVCHPTAWDLGKGDFRILMCTKVTMDDFLTAHNEMGNIQYDMAYAAQPFLLRNGANEGFHEAVGEIMSLSAATPKHLKSIGLLSPDFQEDNETEINFLLKQALTIVGTLPFTYMLEKWRWMVFKGEIPKDQWMKKWWEMKREIVGVVEPVPHDETYCDPASLFHVSNDYSFIRYYTRTLYQFQFQEALCQAAKHEGPLHKCDISNSTEAGQKLFNMLRLGKSEPWTLALENVVGAKNMNVRPLLNYFEPLFTWLKDQNKNSFVGWSTDWSPYADQSIKVRISLKSALGDKAYEWNDNEMYLFRCSVAYAMRQYFLKVKNQMILFGEEDVRVANLKPRISFNFFVTAPKNVSDIIPRTEVEKAIRMSRSRINDAFRLNDNSLEFLGIQPTLGPPNQPPVSDKTHTCPPCPAPELLGGPSVFLFPPKPKDTLMISRTPEVTCVVVDVSHEDPEVKFNWYVDGVEVHNAKTKPREEQYNSTYRVVSVLTVLHQDWLNGKEYKCKVSNKALPAPIEKTISKAKGQPREPQVYTLPPSRDELTKNQVSLTCLVKGFYPSDIAVEWESNGQPENNYKTTPPVLDSDGSFFLYSKLTVDKSRWQQGNVFSCSVMHEALHNHYTQKSLSLSPGK

SEQ ID NO: 76 - protein, 944 aa, artificial
  ACE2 18-732 S645C H374N H378N with IgG4 YTE
QSTIEEQAKTFLDKFNHEAEDLFYQSSLASWNYNTNITEENVQNMNNAGDKWSAFLKEQSTLAQMYPLQEIQNLTVKLQLQALQQNGSSVLSEDKSKRLNTILNTMSTIYSTGKVCNPDNPQECLLLEPGLNEIMANSLDYNERLWAWESWRSEVGKQLRPLYEEYVVLKNEMARANHYEDYGDYWRGDYEVNGVDGYDYSRGQLIEDVEHTFEEIKPLYEHLHAYVRAKLMNAYPSYISPIGCLPAHLLGDMWGRFWTNLYSLTVPFGQKPNIDVTDAMVDQAWDAQRIFKEAEKFFVSVGLPNMTQGFWENSMLTDPGNVQKAVCHPTAWDLGKGDFRILMCTKVTMDDFLTAHNEMGNIQYDMAYAAQPFLLRNGANEGFHEAVGEIMSLSAATPKHLKSIGLLSPDFQEDNETEINFLLKQALTIVGTLPFTYMLEKWRWMVFKGEIPKDQWMKKWWEMKREIVGVVEPVPHDETYCDPASLFHVSNDYSFIRYYTRTLYQFQFQEALCQAAKHEGPLHKCDISNSTEAGQKLFNMLRLGKSEPWTLALENVVGAKNMNVRPLLNYFEPLFTWLKDQNKNSFVGWSTDWSPYADQSIKVRISLKSALGDKAYEWNDNEMYLFRCSVAYAMRQYFLKVKNQMILFGEEDVRVANLKPRISFNFFVTAPKNVSDIIPRTEVEKAIRMSRSRINDAFRLNDNSLEFLGIQPTLGESKYGPPCPPCPAPEFLGGPSVFLFPPKPKDTLYITREPEVTCVVVDVSQEDPEVQFNWYVDGVEVHNAKTKPREEQFNSTYRVVSVLTVLHQDWLNGKEYKCKVSNKGLPSSIEKTISKAKGQPREPQVYTLPPSQEEMTKNQVSLTCLVKGFYPSDIAVEWESNGQPENNYKTTPPVLDSDGSFFLYSRLTVDKSRWQEGNVFSCSVMHEALHNHYTQKSLSLSLGK

SEQ ID NO: 77 - protein, 942 aa, artificial
  ACE2 18-732 S645C+H374N+H378N with IgG1 YTE
QSTIEEQAKTFLDKFNHEAEDLFYQSSLASWNYNTNITEENVQNMNNAGDKWSAFLKEQSTLAQMYPLQEIQNLTVKLQLQALQQNGSSVLSEDKSKRLNTILNTMSTIYSTGKVCNPDNPQECLLLEPGLNEIMANSLDYNERLWAWESWRSEVGKQLRPLYEEYVVLKNEMARANHYEDYGDYWRGDYEVNGVDGYDYSRGQLIEDVEHTFEEIKPLYEHLHAYVRAKLMNAYPSYISPIGCLPAHLLGDMWGRFWTNLYSLTVPFGQKPNIDVTDAMVDQAWDAQRIFKEAEKFFVSVGLPNMTQGFWENSMLTDPGNVQKAVCHPTAWDLGKGDFRILMCTKVTMDDFLTAHNEMGNIQYDMAYAAQPFLLRNGANEGFHEAVGEIMSLSAATPKHLKSIGLLSPDFQEDNETEINFLLKQALTIVGTLPFTYMLEKWRWMVFKGEIPKDQWMKKWWEMKREIVGVVEPVPHDETYCDPASLFHVSNDYSFIRYYTRTLYQFQFQEALCQAAKHEGPLHKCDISNSTEAGQKLFNMLRLGKSEPWTLALENVVGAKNMNVRPLLNYFEPLFTWLKDQNKNSFVGWSTDWSPYADQSIKVRISLKSALGDKAYEWNDNEMYLFRCSVAYAMRQYFLKVKNQMILFGEEDVRVANLKPRISFNFFVTAPKNVSDIIPRTEVEKAIRMSRSRINDAFRLNDNSLEFLGIQPTLGDKTHTCPPCPAPELLGGPSVFLFPPKPKDTLYITREPEVTCVVVDVSHEDPEVKFNWYVDGVEVHNAKTKPREEQYNSTYRVVSVLTVLHQDWLNGKEYKCKVSNKALPAPIEKTISKAKGQPREPQVYTLPPSRDELTKNQVSLTCLVKGFYPSDIAVEWESNGQPENNYKTTPPVLDSDGSFFLYSKLTVDKSRWQQGNVFSCSVMHEALHNHYTQKSLSLSPGK

SEQ ID NO: 78 - protein, 944 aa, artificial
  ACE2 18-732 S645C H374N H378N with IgG4 T256D T307Q
QSTIEEQAKTFLDKFNHEAEDLFYQSSLASWNYNTNITEENVQNMNNAGDKWSAFLKEQSTLAQMYPLQEIQNLTVKLQLQALQQNGSSVLSEDKSKRLNTILNTMSTIYSTGKVCNPDNPQECLLLEPGLNEIMANSLDYNERLWAWESWRSEVGKQLRPLYEEYVVLKNEMARANHYEDYGDYWRGDYEVNGVDGYDYSRGQLIEDVEHTFEEIKPLYEHLHAYVRAKLMNAYPSYISPIGCLPAHLLGDMWGRFWTNLYSLTVPFGQKPNIDVTDAMVDQAWDAQRIFKEAEKFFVSVGLPNMTQGFWENSMLTDPGNVQKAVCHPTAWDLGKGDFRILMCTKVTMDDFLTAHNEMGNIQYDMAYAAQPFLLRNGANEGFHEAVGEIMSLSAATPKHLKSIGLLSPDFQEDNETEINFLLKQALTIVGTLPFTYMLEKWRWMVFKGEIPKDQWMKKWWEMKREIVGVVEPVPHDETYCDPASLFHVSNDYSFIRYYTRTLYQFQFQEALCQAAKHEGPLHKCDISNSTEAGQKLFNMLRLGKSEPWTLALENVVGAKNMNVRPLLNYFEPLFTWLKDQNKNSFVGWSTDWSPYADQSIKVRISLKSALGDKAYEWNDNEMYLFRCSVAYAMRQYFLKVKNQMILFGEEDVRVANLKPRISFNFFVTAPKNVSDIIPRTEVEKAIRMSRSRINDAFRLNDNSLEFLGIQPTLGESKYGPPCPPCPAPEFLGGPSVFLFPPKPKDTLMISRDPEVTCVVVDVSQEDPEVQFNWYVDGVEVHNAKTKPREEQFNSTYRVVSVLQVLHQDWLNGKEYKCKVSNKGLPSSIEKTISKAKGQPREPQVYTLPPSQEEMTKNQVSLTCLVKGFYPSDIAVEWESNGQPENNYKTTPPVLDSDGSFFLYSRLTVDKSRWQEGNVFSCSVMHEALHNHYTQKSLSLSLGK

SEQ ID NO: 79 - protein, 942 aa, artificial
  ACE2 18-732 S645C H374N H378N with IgG1 T256D T307Q
QSTIEEQAKTFLDKFNHEAEDLFYQSSLASWNYNTNITEENVQNMNNAGDKWSAFLKEQSTLAQMYPLQEIQNLTVKLQLQALQQNGSSVLSEDKSKRLNTILNTMSTIYSTGKVCNPDNPQECLLLEPGLNEIMANSLDYNERLWAWESWRSEVGKQLRPLYEEYVVLKNEMARANHYEDYGDYWRGDYEVNGVDGYDYSRGQLIEDVEHTFEEIKPLYEHLHAYVRAKLMNAYPSYISPIGCLPAHLLGDMWGRFWTNLYSLTVPFGQKPNIDVTDAMVDQAWDAQRIFKEAEKFFVSVGLPNMTQGFWENSMLTDPGNVQKAVCHPTAWDLGKGDFRILMCTKVTMDDFLTAHNEMGNIQYDMAYAAQPFLLRNGANEGFHEAVGEIMSLSAATPKHLKSIGLLSPDFQEDNETEINFLLKQALTIVGTLPFTYMLEKWRWMVFKGEIPKDQWMKKWWEMKREIVGVVEPVPHDETYCDPASLFHVSNDYSFIRYYTRTLYQFQFQEALCQAAKHEGPLHKCDISNSTEAGQKLFNMLRLGKSEPWTLALENVVGAKNMNVRPLLNYFEPLFTWLKDQNKNSFVGWSTDWSPYADQSIKVRISLKSALGDKAYEWNDNEMYLFRCSVAYAMRQYFLKVKNQMILFGEEDVRVANLKPRISFNFFVTAPKNVSDIIPRTEVEKAIRMSRSRINDAFRLNDNSLEFLGIQPTLGDKTHTCPPCPAPELLGGPSVFLFPPKPKDTLMISRDPEVTCVVVDVSHEDPEVKFNWYVDGVEVHNAKTKPREEQYNSTYRVVSVLQVLHQDWLNGKEYKCKVSNKALPAPIEKTISKAKGQPREPQVYTLPPSRDELTKNQVSLTCLVKGFYPSDIAVEWESNGQPENNYKTTPPVLDSDGSFFLYSKLTVDKSRWQQGNVFSCSVMHEALHNHYTQKSLSLSPGK

SEQ ID NO: 80 - protein, 952 aa, artificial
  ACE2 18-740 S645C H374N H378N with IgG4 YTE
QSTIEEQAKTFLDKFNHEAEDLFYQSSLASWNYNTNITEENVQNMNNAGDKWSAFLKEQSTLAQMYPLQEIQNLTVKLQLQALQQNGSSVLSEDKSKRLNTILNTMSTIYSTGKVCNPDNPQECLLLEPGLNEIMANSLDYNERLWAWESWRSEVGKQLRPLYEEYVVLKNEMARANHYEDYGDYWRGDYEVNGVDGYDYSRGQLIEDVEHTFEEIKPLYEHLHAYVRAKLMNAYPSYISPIGCLPAHLLGDMWGRFWTNLYSLTVPFGQKPNIDVTDAMVDQAWDAQRIFKEAEKFFVSVGLPNMTQGFWENSMLTDPGNVQKAVCHPTAWDLGKGDFRILMCTKVTMDDFLTAHNEMGNIQYDMAYAAQPFLLRNGANEGFHEAVGEIMSLSAATPKHLKSIGLLSPDFQEDNETEINFLLKQALTIVGTLPFTYMLEKWRWMVFKGEIPKDQWMKKWWEMKREIVGVVEPVPHDETYCDPASLFHVSNDYSFIRYYTRTLYQFQFQEALCQAAKHEGPLHKCDISNSTEAGQKLFNMLRLGKSEPWTLALENVVGAKNMNVRPLLNYFEPLFTWLKDQNKNSFVGWSTDWSPYADQSIKVRISLKSALGDKAYEWNDNEMYLFRCSVAYAMRQYFLKVKNQMILFGEEDVRVANLKPRISFNFFVTAPKNVSDIIPRTEVEKAIRMSRSRINDAFRLNDNSLEFLGIQPTLGPPNQPPVSESKYGPPCPPCPAPEFLGGPSVFLFPPKPKDTLYITREPEVTCVVVDVSQEDPEVQFNWYVDGVEVHNAKTKPREEQFNSTYRVVSVLTVLHQDWLNGKEYKCKVSNKGLPSSIEKTISKAKGQPREPQVYTLPPSQEEMTKNQVSLTCLVKGFYPSDIAVEWESNGQPENNYKTTPPVLDSDGSFFLYSRLTVDKSRWQEGNVFSCSVMHEALHNHYTQKSLSLSLGK

SEQ ID NO: 81 - protein, 950 aa, artificial
  ACE2 18-740 S645C+H374N+H378N with IgG1 YTE
QSTIEEQAKTFLDKFNHEAEDLFYQSSLASWNYNTNITEENVQNMNNAGDKWSAFLKEQSTLAQMYPLQEIQNLTVKLQLQALQQNGSSVLSEDKSKRLNTILNTMSTIYSTGKVCNPDNPQECLLLEPGLNEIMANSLDYNERLWAWESWRSEVGKQLRPLYEEYVVLKNEMARANHYEDYGDYWRGDYEVNGVDGYDYSRGQLIEDVEHTFEEIKPLYEHLHAYVRAKLMNAYPSYISPIGCLPAHLLGDMWGRFWTNLYSLTVPFGQKPNIDVTDAMVDQAWDAQRIFKEAEKFFVSVGLPNMTQGFWENSMLTDPGNVQKAVCHPTAWDLGKGDFRILMCTKVTMDDFLTAHNEMGNIQYDMAYAAQPFLLRNGANEGFHEAVGEIMSLSAATPKHLKSIGLLSPDFQEDNETEINFLLKQALTIVGTLPFTYMLEKWRWMVFKGEIPKDQWMKKWWEMKREIVGVVEPVPHDETYCDPASLFHVSNDYSFIRYYTRTLYQFQFQEALCQAAKHEGPLHKCDISNSTEAGQKLFNMLRLGKSEPWTLALENVVGAKNMNVRPLLNYFEPLFTWLKDQNKNSFVGWSTDWSPYADQSIKVRISLKSALGDKAYEWNDNEMYLFRCSVAYAMRQYFLKVKNQMILFGEEDVRVANLKPRISFNFFVTAPKNVSDIIPRTEVEKAIRMSRSRINDAFRLNDNSLEFLGIQPTLGPPNQPPVSDKTHTCPPCPAPELLGGPSVFLFPPKPKDTLYITREPEVTCVVVDVSHEDPEVKFNWYVDGVEVHNAKTKPREEQYNSTYRVVSVLTVLHQDWLNGKEYKCKVSNKALPAPIEKTISKAKGQPREPQVYTLPPSRDELTKNQVSLTCLVKGFYPSDIAVEWESNGQPENNYKTTPPVLDSDGSFFLYSKLTVDKSRWQQGNVFSCSVMHEALHNHYTQKSLSLSPGK

SEQ ID NO: 82 - protein, 952 aa, artificial
  ACE2 18-740 S645C H374N H378N with IgG4 T256D T307Q
QSTIEEQAKTFLDKFNHEAEDLFYQSSLASWNYNTNITEENVQNMNNAGDKWSAFLKEQSTLAQMYPLQEIQNLTVKLQLQALQQNGSSVLSEDKSKRLNTILNTMSTIYSTGKVCNPDNPQECLLLEPGLNEIMANSLDYNERLWAWESWRSEVGKQLRPLYEEYVVLKNEMARANHYEDYGDYWRGDYEVNGVDGYDYSRGQLIEDVEHTFEEIKPLYEHLHAYVRAKLMNAYPSYISPIGCLPAHLLGDMWGRFWTNLYSLTVPFGQKPNIDVTDAMVDQAWDAQRIFKEAEKFFVSVGLPNMTQGFWENSMLTDPGNVQKAVCHPTAWDLGKGDFRILMCTKVTMDDFLTAHNEMGNIQYDMAYAAQPFLLRNGANEGFHEAVGEIMSLSAATPKHLKSIGLLSPDFQEDNETEINFLLKQALTIVGTLPFTYMLEKWRWMVFKGEIPKDQWMKKWWEMKREIVGVVEPVPHDETYCDPASLFHVSNDYSFIRYYTRTLYQFQFQEALCQAAKHEGPLHKCDISNSTEAGQKLFNMLRLGKSEPWTLALENVVGAKNMNVRPLLNYFEPLFTWLKDQNKNSFVGWSTDWSPYADQSIKVRISLKSALGDKAYEWNDNEMYLFRCSVAYAMRQYFLKVKNQMILFGEEDVRVANLKPRISFNFFVTAPKNVSDIIPRTEVEKAIRMSRSRINDAFRLNDNSLEFLGIQPTLGPPNQPPVSESKYGPPCPPCPAPEFLGGPSVFLFPPKPKDTLMISRDPEVTCVVVDVSQEDPEVQFNWYVDGVEVHNAKTKPREEQFNSTYRVVSVLQVLHQDWLNGKEYKCKVSNKGLPSSIEKTISKAKGQPREPQVYTLPPSQEEMTKNQVSLTCLVKGFYPSDIAVEWESNGQPENNYKTTPPVLDSDGSFFLYSRLTVDKSRWQEGNVFSCSVMHEALHNHYTQKSLSLSLGK

SEQ ID NO: 83 - protein, 950 aa, artificial
  ACE2 18-740 S645C H374N H378N with IgG1 T256D T307Q
QSTIEEQAKTFLDKFNHEAEDLFYQSSLASWNYNTNITEENVQNMNNAGDKWSAFLKEQSTLAQMYPLQEIQNLTVKLQLQALQQNGSSVLSEDKSKRLNTILNTMSTIYSTGKVCNPDNPQECLLLEPGLNEIMANSLDYNERLWAWESWRSEVGKQLRPLYEEYVVLKNEMARANHYEDYGDYWRGDYEVNGVDGYDYSRGQLIEDVEHTFEEIKPLYEHLHAYVRAKLMNAYPSYISPIGCLPAHLLGDMWGRFWTNLYSLTVPFGQKPNIDVTDAMVDQAWDAQRIFKEAEKFFVSVGLPNMTQGFWENSMLTDPGNVQKAVCHPTAWDLGKGDFRILMCTKVTMDDFLTAHNEMGNIQYDMAYAAQPFLLRNGANEGFHEAVGEIMSLSAATPKHLKSIGLLSPDFQEDNETEINFLLKQALTIVGTLPFTYMLEKWRWMVFKGEIPKDQWMKKWWEMKREIVGVVEPVPHDETYCDPASLFHVSNDYSFIRYYTRTLYQFQFQEALCQAAKHEGPLHKCDISNSTEAGQKLFNMLRLGKSEPWTLALENVVGAKNMNVRPLLNYFEPLFTWLKDQNKNSFVGWSTDWSPYADQSIKVRISLKSALGDKAYEWNDNEMYLFRCSVAYAMRQYFLKVKNQMILFGEEDVRVANLKPRISFNFFVTAPKNVSDIIPRTEVEKAIRMSRSRINDAFRLNDNSLEFLGIQPTLGPPNQPPVSDKTHTCPPCPAPELLGGPSVFLFPPKPKDTLMISRDPEVTCVVVDVSHEDPEVKFNWYVDGVEVHNAKTKPREEQYNSTYRVVSVLQVLHQDWLNGKEYKCKVSNKALPAPIEKTISKAKGQPREPQVYTLPPSRDELTKNQVSLTCLVKGFYPSDIAVEWESNGQPENNYKTTPPVLDSDGSFFLYSKLTVDKSRWQQGNVFSCSVMHEALHNHYTQKSLSLSPGK

SEQ ID NO: 84 - protein, 715 aa, artificial
  ACE2 18-732 S645C+R273A
QSTIEEQAKTFLDKFNHEAEDLFYQSSLASWNYNTNITEENVQNMNNAGDKWSAFLKEQSTLAQMYPLQEIQNLTVKLQLQALQQNGSSVLSEDKSKRLNTILNTMSTIYSTGKVCNPDNPQECLLLEPGLNEIMANSLDYNERLWAWESWRSEVGKQLRPLYEEYVVLKNEMARANHYEDYGDYWRGDYEVNGVDGYDYSRGQLIEDVEHTFEEIKPLYEHLHAYVRAKLMNAYPSYISPIGCLPAHLLGDMWGAFWTNLYSLTVPFGQKPNIDVTDAMVDQAWDAQRIFKEAEKFFVSVGLPNMTQGFWENSMLTDPGNVQKAVCHPTAWDLGKGDFRILMCTKVTMDDFLTAHHEMGHIQYDMAYAAQPFLLRNGANEGFHEAVGEIMSLSAATPKHLKSIGLLSPDFQEDNETEINFLLKQALTIVGTLPFTYMLEKWRWMVFKGEIPKDQWMKKWWEMKREIVGVVEPVPHDETYCDPASLFHVSNDYSFIRYYTRTLYQFQFQEALCQAAKHEGPLHKCDISNSTEAGQKLFNMLRLGKSEPWTLALENVVGAKNMNVRPLLNYFEPLFTWLKDQNKNSFVGWSTDWSPYADQSIKVRISLKSALGDKAYEWNDNEMYLFRCSVAYAMRQYFLKVKNQMILFGEEDVRVANLKPRISFNFFVTAPKNVSDIIPRTEVEKAIRMSRSRINDAFRLNDNSLEFLGIQPTLG

SEQ ID NO: 85 - protein, 723 aa, artificial
  ACE2 18-740 S645C+R273A
QSTIEEQAKTFLDKFNHEAEDLFYQSSLASWNYNTNITEENVQNMNNAGDKWSAFLKEQSTLAQMYPLQEIQNLTVKLQLQALQQNGSSVLSEDKSKRLNTILNTMSTIYSTGKVCNPDNPQECLLLEPGLNEIMANSLDYNERLWAWESWRSEVGKQLRPLYEEYVVLKNEMARANHYEDYGDYWRGDYEVNGVDGYDYSRGQLIEDVEHTFEEIKPLYEHLHAYVRAKLMNAYPSYISPIGCLPAHLLGDMWGAFWTNLYSLTVPFGQKPNIDVTDAMVDQAWDAQRIFKEAEKFFVSVGLPNMTQGFWENSMLTDPGNVQKAVCHPTAWDLGKGDFRILMCTKVTMDDFLTAHHEMGHIQYDMAYAAQPFLLRNGANEGFHEAVGEIMSLSAATPKHLKSIGLLSPDFQEDNETEINFLLKQALTIVGTLPFTYMLEKWRWMVFKGEIPKDQWMKKWWEMKREIVGVVEPVPHDETYCDPASLFHVSNDYSFIRYYTRTLYQFQFQEALCQAAKHEGPLHKCDISNSTEAGQKLFNMLRLGKSEPWTLALENVVGAKNMNVRPLLNYFEPLFTWLKDQNKNSFVGWSTDWSPYADQSIKVRISLKSALGDKAYEWNDNEMYLFRCSVAYAMRQYFLKVKNQMILFGEEDVRVANLKPRISFNFFVTAPKNVSDIIPRTEVEKAIRMSRSRINDAFRLNDNSLEFLGIQPTLGPPNQPPVS

SEQ ID NO: 86 - protein, 944 aa, artificial
  ACE2 18-732 S645C R273A IgG4 wt
QSTIEEQAKTFLDKFNHEAEDLFYQSSLASWNYNTNITEENVQNMNNAGDKWSAFLKEQSTLAQMYPLQEIQNLTVKLQLQALQQNGSSVLSEDKSKRLNTILNTMSTIYSTGKVCNPDNPQECLLLEPGLNEIMANSLDYNERLWAWESWRSEVGKQLRPLYEEYVVLKNEMARANHYEDYGDYWRGDYEVNGVDGYDYSRGQLIEDVEHTFEEIKPLYEHLHAYVRAKLMNAYPSYISPIGCLPAHLLGDMWGAFWTNLYSLTVPFGQKPNIDVTDAMVDQAWDAQRIFKEAEKFFVSVGLPNMTQGFWENSMLTDPGNVQKAVCHPTAWDLGKGDFRILMCTKVTMDDFLTAHHEMGHIQYDMAYAAQPFLLRNGANEGFHEAVGEIMSLSAATPKHLKSIGLLSPDFQEDNETEINFLLKQALTIVGTLPFTYMLEKWRWMVFKGEIPKDQWMKKWWEMKREIVGVVEPVPHDETYCDPASLFHVSNDYSFIRYYTRTLYQFQFQEALCQAAKHEGPLHKCDISNSTEAGQKLFNMLRLGKSEPWTLALENVVGAKNMNVRPLLNYFEPLFTWLKDQNKNSFVGWSTDWSPYADQSIKVRISLKSALGDKAYEWNDNEMYLFRCSVAYAMRQYFLKVKNQMILFGEEDVRVANLKPRISFNFFVTAPKNVSDIIPRTEVEKAIRMSRSRINDAFRLNDNSLEFLGIQPTLGESKYGPPCPPCPAPEFLGGPSVFLFPPKPKDTLMISRTPEVTCVVVDVSQEDPEVQFNWYVDGVEVHNAKTKPREEQFNSTYRVVSVLTVLHQDWLNGKEYKCKVSNKGLPSSIEKTISKAKGQPREPQVYTLPPSQEEMTKNQVSLTCLVKGFYPSDIAVEWESNGQPENNYKTTPPVLDSDGSFFLYSRLTVDKSRWQEGNVFSCSVMHEALHNHYTQKSLSLSLGK

SEQ ID NO: 87 - protein, 942 aa, artificial
  ACE2 18-732 S645C R273A with IgG1 wt
QSTIEEQAKTFLDKFNHEAEDLFYQSSLASWNYNTNITEENVQNMNNAGDKWSAFLKEQSTLAQMYPLQEIQNLTVKLQLQALQQNGSSVLSEDKSKRLNTILNTMSTIYSTGKVCNPDNPQECLLLEPGLNEIMANSLDYNERLWAWESWRSEVGKQLRPLYEEYVVLKNEMARANHYEDYGDYWRGDYEVNGVDGYDYSRGQLIEDVEHTFEEIKPLYEHLHAYVRAKLMNAYPSYISPIGCLPAHLLGDMWGAFWTNLYSLTVPFGQKPNIDVTDAMVDQAWDAQRIFKEAEKFFVSVGLPNMTQGFWENSMLTDPGNVQKAVCHPTAWDLGKGDFRILMCTKVTMDDFLTAHHEMGHIQYDMAYAAQPFLLRNGANEGFHEAVGEIMSLSAATPKHLKSIGLLSPDFQEDNETEINFLLKQALTIVGTLPFTYMLEKWRWMVFKGEIPKDQWMKKWWEMKREIVGVVEPVPHDETYCDPASLFHVSNDYSFIRYYTRTLYQFQFQEALCQAAKHEGPLHKCDISNSTEAGQKLFNMLRLGKSEPWTLALENVVGAKNMNVRPLLNYFEPLFTWLKDQNKNSFVGWSTDWSPYADQSIKVRISLKSALGDKAYEWNDNEMYLFRCSVAYAMRQYFLKVKNQMILFGEEDVRVANLKPRISFNFFVTAPKNVSDIIPRTEVEKAIRMSRSRINDAFRLNDNSLEFLGIQPTLGDKTHTCPPCPAPELLGGPSVFLFPPKPKDTLMISRTPEVTCVVVDVSHEDPEVKFNWYVDGVEVHNAKTKPREEQYNSTYRVVSVLTVLHQDWLNGKEYKCKVSNKALPAPIEKTISKAKGQPREPQVYTLPPSRDELTKNQVSLTCLVKGFYPSDIAVEWESNGQPENNYKTTPPVLDSDGSFFLYSKLTVDKSRWQQGNVFSCSVMHEALHNHYTQKSLSLSPGK

SEQ ID NO: 88 - protein, 952 aa, artificial
  ACE2 18-740 S645C R273A with IgG4 wt
QSTIEEQAKTFLDKFNHEAEDLFYQSSLASWNYNTNITEENVQNMNNAGDKWSAFLKEQSTLAQMYPLQEIQNLTVKLQLQALQQNGSSVLSEDKSKRLNTILNTMSTIYSTGKVCNPDNPQECLLLEPGLNEIMANSLDYNERLWAWESWRSEVGKQLRPLYEEYVVLKNEMARANHYEDYGDYWRGDYEVNGVDGYDYSRGQLIEDVEHTFEEIKPLYEHLHAYVRAKLMNAYPSYISPIGCLPAHLLGDMWGAFWTNLYSLTVPFGQKPNIDVTDAMVDQAWDAQRIFKEAEKFFVSVGLPNMTQGFWENSMLTDPGNVQKAVCHPTAWDLGKGDFRILMCTKVTMDDFLTAHHEMGHIQYDMAYAAQPFLLRNGANEGFHEAVGEIMSLSAATPKHLKSIGLLSPDFQEDNETEINFLLKQALTIVGTLPFTYMLEKWRWMVFKGEIPKDQWMKKWWEMKREIVGVVEPVPHDETYCDPASLFHVSNDYSFIRYYTRTLYQFQFQEALCQAAKHEGPLHKCDISNSTEAGQKLFNMLRLGKSEPWTLALENVVGAKNMNVRPLLNYFEPLFTWLKDQNKNSFVGWSTDWSPYADQSIKVRISLKSALGDKAYEWNDNEMYLFRCSVAYAMRQYFLKVKNQMILFGEEDVRVANLKPRISFNFFVTAPKNVSDIIPRTEVEKAIRMSRSRINDAFRLNDNSLEFLGIQPTLGPPNQPPVSESKYGPPCPPCPAPEFLGGPSVFLFPPKPKDTLMISRTPEVTCVVVDVSQEDPEVQFNWYVDGVEVHNAKTKPREEQFNSTYRVVSVLTVLHQDWLNGKEYKCKVSNKGLPSSIEKTISKAKGQPREPQVYTLPPSQEEMTKNQVSLTCLVKGFYPSDIAVEWESNGQPENNYKTTPPVLDSDGSFFLYSRLTVDKSRWQEGNVFSCSVMHEALHNHYTQKSLSLSLGK

SEQ ID NO: 89 - protein, 950 aa, artificial
  ACE2 18-740 S645C R273A IgG1 wt
QSTIEEQAKTFLDKFNHEAEDLFYQSSLASWNYNTNITEENVQNMNNAGDKWSAFLKEQSTLAQMYPLQEIQNLTVKLQLQALQQNGSSVLSEDKSKRLNTILNTMSTIYSTGKVCNPDNPQECLLLEPGLNEIMANSLDYNERLWAWESWRSEVGKQLRPLYEEYVVLKNEMARANHYEDYGDYWRGDYEVNGVDGYDYSRGQLIEDVEHTFEEIKPLYEHLHAYVRAKLMNAYPSYISPIGCLPAHLLGDMWGAFWTNLYSLTVPFGQKPNIDVTDAMVDQAWDAQRIFKEAEKFFVSVGLPNMTQGFWENSMLTDPGNVQKAVCHPTAWDLGKGDFRILMCTKVTMDDFLTAHHEMGHIQYDMAYAAQPFLLRNGANEGFHEAVGEIMSLSAATPKHLKSIGLLSPDFQEDNETEINFLLKQALTIVGTLPFTYMLEKWRWMVFKGEIPKDQWMKKWWEMKREIVGVVEPVPHDETYCDPASLFHVSNDYSFIRYYTRTLYQFQFQEALCQAAKHEGPLHKCDISNSTEAGQKLFNMLRLGKSEPWTLALENVVGAKNMNVRPLLNYFEPLFTWLKDQNKNSFVGWSTDWSPYADQSIKVRISLKSALGDKAYEWNDNEMYLFRCSVAYAMRQYFLKVKNQMILFGEEDVRVANLKPRISFNFFVTAPKNVSDIIPRTEVEKAIRMSRSRINDAFRLNDNSLEFLGIQPTLGPPNQPPVSDKTHTCPPCPAPELLGGPSVFLFPPKPKDTLMISRTPEVTCVVVDVSHEDPEVKFNWYVDGVEVHNAKTKPREEQYNSTYRVVSVLTVLHQDWLNGKEYKCKVSNKALPAPIEKTISKAKGQPREPQVYTLPPSRDELTKNQVSLTCLVKGFYPSDIAVEWESNGQPENNYKTTPPVLDSDGSFFLYSKLTVDKSRWQQGNVFSCSVMHEALHNHYTQKSLSLSPGK

SEQ ID NO: 90 - protein, 944 aa, artificial
  ACE2 18-732 S645C R273 A with IgG4 YTE
QSTIEEQAKTFLDKFNHEAEDLFYQSSLASWNYNTNITEENVQNMNNAGDKWSAFLKEQSTLAQMYPLQEIQNLTVKLQLQALQQNGSSVLSEDKSKRLNTILNTMSTIYSTGKVCNPDNPQECLLLEPGLNEIMANSLDYNERLWAWESWRSEVGKQLRPLYEEYVVLKNEMARANHYEDYGDYWRGDYEVNGVDGYDYSRGQLIEDVEHTFEEIKPLYEHLHAYVRAKLMNAYPSYISPIGCLPAHLLGDMWGAFWTNLYSLTVPFGQKPNIDVTDAMVDQAWDAQRIFKEAEKFFVSVGLPNMTQGFWENSMLTDPGNVQKAVCHPTAWDLGKGDFRILMCTKVTMDDFLTAHHEMGHIQYDMAYAAQPFLLRNGANEGFHEAVGEIMSLSAATPKHLKSIGLLSPDFQEDNETEINFLLKQALTIVGTLPFTYMLEKWRWMVFKGEIPKDQWMKKWWEMKREIVGVVEPVPHDETYCDPASLFHVSNDYSFIRYYTRTLYQFQFQEALCQAAKHEGPLHKCDISNSTEAGQKLFNMLRLGKSEPWTLALENVVGAKNMNVRPLLNYFEPLFTWLKDQNKNSFVGWSTDWSPYADQSIKVRISLKSALGDKAYEWNDNEMYLFRCSVAYAMRQYFLKVKNQMILFGEEDVRVANLKPRISFNFFVTAPKNVSDIIPRTEVEKAIRMSRSRINDAFRLNDNSLEFLGIQPTLGESKYGPPCPPCPAPEFLGGPSVFLFPPKPKDTLYITREPEVTCVVVDVSQEDPEVQFNWYVDGVEVHNAKTKPREEQFNSTYRVVSVLTVLHQDWLNGKEYKCKVSNKGLPSSIEKTISKAKGQPREPQVYTLPPSQEEMTKNQVSLTCLVKGFYPSDIAVEWESNGQPENNYKTTPPVLDSDGSFFLYSRLTVDKSRWQEGNVFSCSVMHEALHNHYTQKSLSLSLGK

SEQ ID NO: 91 - protein, 942 aa, artificial
  ACE2 18-732 S645C+R273A with IgG1 YTE
QSTIEEQAKTFLDKFNHEAEDLFYQSSLASWNYNTNITEENVQNMNNAGDKWSAFLKEQSTLAQMYPLQEIQNLTVKLQLQALQQNGSSVLSEDKSKRLNTILNTMSTIYSTGKVCNPDNPQECLLLEPGLNEIMANSLDYNERLWAWESWRSEVGKQLRPLYEEYVVLKNEMARANHYEDYGDYWRGDYEVNGVDGYDYSRGQLIEDVEHTFEEIKPLYEHLHAYVRAKLMNAYPSYISPIGCLPAHLLGDMWGAFWTNLYSLTVPFGQKPNIDVTDAMVDQAWDAQRIFKEAEKFFVSVGLPNMTQGFWENSMLTDPGNVQKAVCHPTAWDLGKGDFRILMCTKVTMDDFLTAHHEMGHIQYDMAYAAQPFLLRNGANEGFHEAVGEIMSLSAATPKHLKSIGLLSPDFQEDNETEINFLLKQALTIVGTLPFTYMLEKWRWMVFKGEIPKDQWMKKWWEMKREIVGVVEPVPHDETYCDPASLFHVSNDYSFIRYYTRTLYQFQFQEALCQAAKHEGPLHKCDISNSTEAGQKLFNMLRLGKSEPWTLALENVVGAKNMNVRPLLNYFEPLFTWLKDQNKNSFVGWSTDWSPYADQSIKVRISLKSALGDKAYEWNDNEMYLFRCSVAYAMRQYFLKVKNQMILFGEEDVRVANLKPRISFNFFVTAPKNVSDIIPRTEVEKAIRMSRSRINDAFRLNDNSLEFLGIQPTLGDKTHTCPPCPAPELLGGPSVFLFPPKPKDTLYITREPEVTCVVVDVSHEDPEVKFNWYVDGVEVHNAKTKPREEQYNSTYRVVSVLTVLHQDWLNGKEYKCKVSNKALPAPIEKTISKAKGQPREPQVYTLPPSRDELTKNQVSLTCLVKGFYPSDIAVEWESNGQPENNYKTTPPVLDSDGSFFLYSKLTVDKSRWQQGNVFSCSVMHEALHNHYTQKSLSLSPGK

SEQ ID NO: 92 - protein, 944 aa, artificial
  ACE2 18-732 S645C R273A with IgG4 T256D T307Q
QSTIEEQAKTFLDKFNHEAEDLFYQSSLASWNYNTNITEENVQNMNNAGDKWSAFLKEQSTLAQMYPLQEIQNLTVKLQLQALQQNGSSVLSEDKSKRLNTILNTMSTIYSTGKVCNPDNPQECLLLEPGLNEIMANSLDYNERLWAWESWRSEVGKQLRPLYEEYVVLKNEMARANHYEDYGDYWRGDYEVNGVDGYDYSRGQLIEDVEHTFEEIKPLYEHLHAYVRAKLMNAYPSYISPIGCLPAHLLGDMWGAFWTNLYSLTVPFGQKPNIDVTDAMVDQAWDAQRIFKEAEKFFVSVGLPNMTQGFWENSMLTDPGNVQKAVCHPTAWDLGKGDFRILMCTKVTMDDFLTAHHEMGHIQYDMAYAAQPFLLRNGANEGFHEAVGEIMSLSAATPKHLKSIGLLSPDFQEDNETEINFLLKQALTIVGTLPFTYMLEKWRWMVFKGEIPKDQWMKKWWEMKREIVGVVEPVPHDETYCDPASLFHVSNDYSFIRYYTRTLYQFQFQEALCQAAKHEGPLHKCDISNSTEAGQKLFNMLRLGKSEPWTLALENVVGAKNMNVRPLLNYFEPLFTWLKDQNKNSFVGWSTDWSPYADQSIKVRISLKSALGDKAYEWNDNEMYLFRCSVAYAMRQYFLKVKNQMILFGEEDVRVANLKPRISFNFFVTAPKNVSDIIPRTEVEKAIRMSRSRINDAFRLNDNSLEFLGIQPTLGESKYGPPCPPCPAPEFLGGPSVFLFPPKPKDTLMISRDPEVTCVVVDVSQEDPEVQFNWYVDGVEVHNAKTKPREEQFNSTYRVVSVLQVLHQDWLNGKEYKCKVSNKGLPSSIEKTISKAKGQPREPQVYTLPPSQEEMTKNQVSLTCLVKGFYPSDIAVEWESNGQPENNYKTTPPVLDSDGSFFLYSRLTVDKSRWQEGNVFSCSVMHEALHNHYTQKSLSLSLGK

SEQ ID NO: 93 - protein, 942 aa, artificial
  ACE2 18-732 S645C R273A with IgG1 T256D T307Q
QSTIEEQAKTFLDKFNHEAEDLFYQSSLASWNYNTNITEENVQNMNNAGDKWSAFLKEQSTLAQMYPLQEIQNLTVKLQLQALQQNGSSVLSEDKSKRLNTILNTMSTIYSTGKVCNPDNPQECLLLEPGLNEIMANSLDYNERLWAWESWRSEVGKQLRPLYEEYVVLKNEMARANHYEDYGDYWRGDYEVNGVDGYDYSRGQLIEDVEHTFEEIKPLYEHLHAYVRAKLMNAYPSYISPIGCLPAHLLGDMWGAFWTNLYSLTVPFGQKPNIDVTDAMVDQAWDAQRIFKEAEKFFVSVGLPNMTQGFWENSMLTDPGNVQKAVCHPTAWDLGKGDFRILMCTKVTMDDFLTAHHEMGHIQYDMAYAAQPFLLRNGANEGFHEAVGEIMSLSAATPKHLKSIGLLSPDFQEDNETEINFLLKQALTIVGTLPFTYMLEKWRWMVFKGEIPKDQWMKKWWEMKREIVGVVEPVPHDETYCDPASLFHVSNDYSFIRYYTRTLYQFQFQEALCQAAKHEGPLHKCDISNSTEAGQKLFNMLRLGKSEPWTLALENVVGAKNMNVRPLLNYFEPLFTWLKDQNKNSFVGWSTDWSPYADQSIKVRISLKSALGDKAYEWNDNEMYLFRCSVAYAMRQYFLKVKNQMILFGEEDVRVANLKPRISFNFFVTAPKNVSDIIPRTEVEKAIRMSRSRINDAFRLNDNSLEFLGIQPTLGDKTHTCPPCPAPELLGGPSVFLFPPKPKDTLMISRDPEVTCVVVDVSHEDPEVKFNWYVDGVEVHNAKTKPREEQYNSTYRVVSVLQVLHQDWLNGKEYKCKVSNKALPAPIEKTISKAKGQPREPQVYTLPPSRDELTKNQVSLTCLVKGFYPSDIAVEWESNGQPENNYKTTPPVLDSDGSFFLYSKLTVDKSRWQQGNVFSCSVMHEALHNHYTQKSLSLSPGK

SEQ ID NO: 94 - protein, 952 aa, artificial
  ACE2 18-740 S645C R273A with IgG4 YTE
QSTIEEQAKTFLDKFNHEAEDLFYQSSLASWNYNTNITEENVQNMNNAGDKWSAFLKEQSTLAQMYPLQEIQNLTVKLQLQALQQNGSSVLSEDKSKRLNTILNTMSTIYSTGKVCNPDNPQECLLLEPGLNEIMANSLDYNERLWAWESWRSEVGKQLRPLYEEYVVLKNEMARANHYEDYGDYWRGDYEVNGVDGYDYSRGQLIEDVEHTFEEIKPLYEHLHAYVRAKLMNAYPSYISPIGCLPAHLLGDMWGAFWTNLYSLTVPFGQKPNIDVTDAMVDQAWDAQRIFKEAEKFFVSVGLPNMTQGFWENSMLTDPGNVQKAVCHPTAWDLGKGDFRILMCTKVTMDDFLTAHHEMGHIQYDMAYAAQPFLLRNGANEGFHEAVGEIMSLSAATPKHLKSIGLLSPDFQEDNETEINFLLKQALTIVGTLPFTYMLEKWRWMVFKGEIPKDQWMKKWWEMKREIVGVVEPVPHDETYCDPASLFHVSNDYSFIRYYTRTLYQFQFQEALCQAAKHEGPLHKCDISNSTEAGQKLFNMLRLGKSEPWTLALENVVGAKNMNVRPLLNYFEPLFTWLKDQNKNSFVGWSTDWSPYADQSIKVRISLKSALGDKAYEWNDNEMYLFRCSVAYAMRQYFLKVKNQMILFGEEDVRVANLKPRISFNFFVTAPKNVSDIIPRTEVEKAIRMSRSRINDAFRLNDNSLEFLGIQPTLGPPNQPPVSESKYGPPCPPCPAPEFLGGPSVFLFPPKPKDTLYITREPEVTCVVVDVSQEDPEVQFNWYVDGVEVHNAKTKPREEQFNSTYRVVSVLTVLHQDWLNGKEYKCKVSNKGLPSSIEKTISKAKGQPREPQVYTLPPSQEEMTKNQVSLTCLVKGFYPSDIAVEWESNGQPENNYKTTPPVLDSDGSFFLYSRLTVDKSRWQEGNVFSCSVMHEALHNHYTQKSLSLSLGK

SEQ ID NO: 95 - protein, 950 aa, artificial
  ACE2 18-740 S645C+R273A with IgG1 YTE
QSTIEEQAKTFLDKFNHEAEDLFYQSSLASWNYNTNITEENVQNMNNAGDKWSAFLKEQSTLAQMYPLQEIQNLTVKLQLQALQQNGSSVLSEDKSKRLNTILNTMSTIYSTGKVCNPDNPQECLLLEPGLNEIMANSLDYNERLWAWESWRSEVGKQLRPLYEEYVVLKNEMARANHYEDYGDYWRGDYEVNGVDGYDYSRGQLIEDVEHTFEEIKPLYEHLHAYVRAKLMNAYPSYISPIGCLPAHLLGDMWGAFWTNLYSLTVPFGQKPNIDVTDAMVDQAWDAQRIFKEAEKFFVSVGLPNMTQGFWENSMLTDPGNVQKAVCHPTAWDLGKGDFRILMCTKVTMDDFLTAHHEMGHIQYDMAYAAQPFLLRNGANEGFHEAVGEIMSLSAATPKHLKSIGLLSPDFQEDNETEINFLLKQALTIVGTLPFTYMLEKWRWMVFKGEIPKDQWMKKWWEMKREIVGVVEPVPHDETYCDPASLFHVSNDYSFIRYYTRTLYQFQFQEALCQAAKHEGPLHKCDISNSTEAGQKLFNMLRLGKSEPWTLALENVVGAKNMNVRPLLNYFEPLFTWLKDQNKNSFVGWSTDWSPYADQSIKVRISLKSALGDKAYEWNDNEMYLFRCSVAYAMRQYFLKVKNQMILFGEEDVRVANLKPRISFNFFVTAPKNVSDIIPRTEVEKAIRMSRSRINDAFRLNDNSLEFLGIQPTLGPPNQPPVSDKTHTCPPCPAPELLGGPSVFLFPPKPKDTLYITREPEVTCVVVDVSHEDPEVKFNWYVDGVEVHNAKTKPREEQYNSTYRVVSVLTVLHQDWLNGKEYKCKVSNKALPAPIEKTISKAKGQPREPQVYTLPPSRDELTKNQVSLTCLVKGFYPSDIAVEWESNGQPENNYKTTPPVLDSDGSFFLYSKLTVDKSRWQQGNVFSCSVMHEALHNHYTQKSLSLSPGK

SEQ ID NO: 96 - protein, 952 aa, artificial
  ACE2 18-740 S645C R273A with IgG4 T256D T307Q
QSTIEEQAKTFLDKFNHEAEDLFYQSSLASWNYNTNITEENVQNMNNAGDKWSAFLKEQSTLAQMYPLQEIQNLTVKLQLQALQQNGSSVLSEDKSKRLNTILNTMSTIYSTGKVCNPDNPQECLLLEPGLNEIMANSLDYNERLWAWESWRSEVGKQLRPLYEEYVVLKNEMARANHYEDYGDYWRGDYEVNGVDGYDYSRGQLIEDVEHTFEEIKPLYEHLHAYVRAKLMNAYPSYISPIGCLPAHLLGDMWGAFWTNLYSLTVPFGQKPNIDVTDAMVDQAWDAQRIFKEAEKFFVSVGLPNMTQGFWENSMLTDPGNVQKAVCHPTAWDLGKGDFRILMCTKVTMDDFLTAHHEMGHIQYDMAYAAQPFLLRNGANEGFHEAVGEIMSLSAATPKHLKSIGLLSPDFQEDNETEINFLLKQALTIVGTLPFTYMLEKWRWMVFKGEIPKDQWMKKWWEMKREIVGVVEPVPHDETYCDPASLFHVSNDYSFIRYYTRTLYQFQFQEALCQAAKHEGPLHKCDISNSTEAGQKLFNMLRLGKSEPWTLALENVVGAKNMNVRPLLNYFEPLFTWLKDQNKNSFVGWSTDWSPYADQSIKVRISLKSALGDKAYEWNDNEMYLFRCSVAYAMRQYFLKVKNQMILFGEEDVRVANLKPRISFNFFVTAPKNVSDIIPRTEVEKAIRMSRSRINDAFRLNDNSLEFLGIQPTLGPPNQPPVSESKYGPPCPPCPAPEFLGGPSVFLFPPKPKDTLMISRDPEVTCVVVDVSQEDPEVQFNWYVDGVEVHNAKTKPREEQFNSTYRVVSVLQVLHQDWLNGKEYKCKVSNKGLPSSIEKTISKAKGQPREPQVYTLPPSQEEMTKNQVSLTCLVKGFYPSDIAVEWESNGQPENNYKTTPPVLDSDGSFFLYSRLTVDKSRWQEGNVFSCSVMHEALHNHYTQKSLSLSLGK

SEQ ID NO: 97 - protein, 950 aa, artificial
  ACE2 18-740 S645C R273A with IgG1 T256D T307Q
QSTIEEQAKTFLDKFNHEAEDLFYQSSLASWNYNTNITEENVQNMNNAGDKWSAFLKEQSTLAQMYPLQEIQNLTVKLQLQALQQNGSSVLSEDKSKRLNTILNTMSTIYSTGKVCNPDNPQECLLLEPGLNEIMANSLDYNERLWAWESWRSEVGKQLRPLYEEYVVLKNEMARANHYEDYGDYWRGDYEVNGVDGYDYSRGQLIEDVEHTFEEIKPLYEHLHAYVRAKLMNAYPSYISPIGCLPAHLLGDMWGAFWTNLYSLTVPFGQKPNIDVTDAMVDQAWDAQRIFKEAEKFFVSVGLPNMTQGFWENSMLTDPGNVQKAVCHPTAWDLGKGDFRILMCTKVTMDDFLTAHHEMGHIQYDMAYAAQPFLLRNGANEGFHEAVGEIMSLSAATPKHLKSIGLLSPDFQEDNETEINFLLKQALTIVGTLPFTYMLEKWRWMVFKGEIPKDQWMKKWWEMKREIVGVVEPVPHDETYCDPASLFHVSNDYSFIRYYTRTLYQFQFQEALCQAAKHEGPLHKCDISNSTEAGQKLFNMLRLGKSEPWTLALENVVGAKNMNVRPLLNYFEPLFTWLKDQNKNSFVGWSTDWSPYADQSIKVRISLKSALGDKAYEWNDNEMYLFRCSVAYAMRQYFLKVKNQMILFGEEDVRVANLKPRISFNFFVTAPKNVSDIIPRTEVEKAIRMSRSRINDAFRLNDNSLEFLGIQPTLGPPNQPPVSDKTHTCPPCPAPELLGGPSVFLFPPKPKDTLMISRDPEVTCVVVDVSHEDPEVKFNWYVDGVEVHNAKTKPREEQYNSTYRVVSVLQVLHQDWLNGKEYKCKVSNKALPAPIEKTISKAKGQPREPQVYTLPPSRDELTKNQVSLTCLVKGFYPSDIAVEWESNGQPENNYKTTPPVLDSDGSFFLYSKLTVDKSRWQQGNVFSCSVMHEALHNHYTQKSLSLSPGK

SEQ ID NO: 98 - protein, 77 aa, human
VPLSRTVRCTCISISNQPVNPRSLEKLEIIPASQFCPRVEIIATMKKKGEKRCLNPESKAIKNLLKAVSKERSKRSP

SEQ ID NO: 99 - protein, 1020 aa, artificial
  ACE2 18-732 with IgG4 and IP10
QSTIEEQAKTFLDKFNHEAEDLFYQSSLASWNYNTNITEENVQNMNNAGDKWSAFLKEQSTLAQMYPLQEIQNLTVKLQLQALQQNGSSVLSEDKSKRLNTILNTMSTIYSTGKVCNPDNPQECLLLEPGLNEIMANSLDYNERLWAWESWRSEVGKQLRPLYEEYVVLKNEMARANHYEDYGDYWRGDYEVNGVDGYDYSRGQLIEDVEHTFEEIKPLYEHLHAYVRAKLMNAYPSYISPIGCLPAHLLGDMWGRFWTNLYSLTVPFGQKPNIDVTDAMVDQAWDAQRIFKEAEKFFVSVGLPNMTQGFWENSMLTDPGNVQKAVCHPTAWDLGKGDFRILMCTKVTMDDFLTAHHEMGHIQYDMAYAAQPFLLRNGANEGFHEAVGEIMSLSAATPKHLKSIGLLSPDFQEDNETEINFLLKQALTIVGTLPFTYMLEKWRWMVFKGEIPKDQWMKKWWEMKREIVGVVEPVPHDETYCDPASLFHVSNDYSFIRYYTRTLYQFQFQEALCQAAKHEGPLHKCDISNSTEAGQKLFNMLRLGKSEPWTLALENVVGAKNMNVRPLLNYFEPLFTWLKDQNKNSFVGWSTDWSPYADQSIKVRISLKSALGDKAYEWNDNEMYLFRSSVAYAMRQYFLKVKNQMILFGEEDVRVANLKPRISFNFFVTAPKNVSDIIPRTEVEKAIRMSRSRINDAFRLNDNSLEFLGIQPTLGESKYGPPCPPCPAPEFLGGPSVFLFPPKPKDTLMISRTPEVTCVVVDVSQEDPEVQFNWYVDGVEVHNAKTKPREEQFNSTYRVVSVLTVLHQDWLNGKEYKCKVSNKGLPSSIEKTISKAKGQPREPQVYTLPPSQEEMTKNQVSLTCLVKGFYPSDIAVEWESNGQPENNYKTTPPVLDSDGSFFLYSRLTVDKSRWQEGNVFSCSVMHEALHNHYTQKSLSLSLGVPLSRTVRCTCISISNQPVNPRSLEKLEIIPASQFCPRVEIIATMKKKGEKRCLNPESKAIKNLLKAVSKERSKRSP

SEQ ID NO: 100 - protein, 1018 aa, artificial
  ACE2 18-732 with IgG1 and IP10
QSTIEEQAKTFLDKFNHEAEDLFYQSSLASWNYNTNITEENVQNMNNAGDKWSAFLKEQSTLAQMYPLQEIQNLTVKLQLQALQQNGSSVLSEDKSKRLNTILNTMSTIYSTGKVCNPDNPQECLLLEPGLNEIMANSLDYNERLWAWESWRSEVGKQLRPLYEEYVVLKNEMARANHYEDYGDYWRGDYEVNGVDGYDYSRGQLIEDVEHTFEEIKPLYEHLHAYVRAKLMNAYPSYISPIGCLPAHLLGDMWGRFWTNLYSLTVPFGQKPNIDVTDAMVDQAWDAQRIFKEAEKFFVSVGLPNMTQGFWENSMLTDPGNVQKAVCHPTAWDLGKGDFRILMCTKVTMDDFLTAHHEMGHIQYDMAYAAQPFLLRNGANEGFHEAVGEIMSLSAATPKHLKSIGLLSPDFQEDNETEINFLLKQALTIVGTLPFTYMLEKWRWMVFKGEIPKDQWMKKWWEMKREIVGVVEPVPHDETYCDPASLFHVSNDYSFIRYYTRTLYQFQFQEALCQAAKHEGPLHKCDISNSTEAGQKLFNMLRLGKSEPWTLALENVVGAKNMNVRPLLNYFEPLFTWLKDQNKNSFVGWSTDWSPYADQSIKVRISLKSALGDKAYEWNDNEMYLFRSSVAYAMRQYFLKVKNQMILFGEEDVRVANLKPRISFNFFVTAPKNVSDIIPRTEVEKAIRMSRSRINDAFRLNDNSLEFLGIQPTLGDKTHTCPPCPAPELLGGPSVFLFPPKPKDTLMISRTPEVTCVVVDVSHEDPEVKFNWYVDGVEVHNAKTKPREEQYNSTYRVVSVLTVLHQDWLNGKEYKCKVSNKALPAPIEKTISKAKGQPREPQVYTLPPSRDELTKNQVSLTCLVKGFYPSDIAVEWESNGQPENNYKTTPPVLDSDGSFFLYSKLTVDKSRWQQGNVFSCSVMHEALHNHYTQKSLSLSPGVPLSRTVRCTCISISNQPVNPRSLEKLEIIPASQFCPRVEIIATMKKKGEKRCLNPESKAIKNLLKAVSKERSKRSP

SEQ ID NO: 101 - protein, 1028 aa, artificial
  ACE2 18-740 with IgG4 and IP10
QSTIEEQAKTFLDKFNHEAEDLFYQSSLASWNYNTNITEENVQNMNNAGDKWSAFLKEQSTLAQMYPLQEIQNLTVKLQLQALQQNGSSVLSEDKSKRLNTILNTMSTIYSTGKVCNPDNPQECLLLEPGLNEIMANSLDYNERLWAWESWRSEVGKQLRPLYEEYVVLKNEMARANHYEDYGDYWRGDYEVNGVDGYDYSRGQLIEDVEHTFEEIKPLYEHLHAYVRAKLMNAYPSYISPIGCLPAHLLGDMWGRFWTNLYSLTVPFGQKPNIDVTDAMVDQAWDAQRIFKEAEKFFVSVGLPNMTQGFWENSMLTDPGNVQKAVCHPTAWDLGKGDFRILMCTKVTMDDFLTAHHEMGHIQYDMAYAAQPFLLRNGANEGFHEAVGEIMSLSAATPKHLKSIGLLSPDFQEDNETEINFLLKQALTIVGTLPFTYMLEKWRWMVFKGEIPKDQWMKKWWEMKREIVGVVEPVPHDETYCDPASLFHVSNDYSFIRYYTRTLYQFQFQEALCQAAKHEGPLHKCDISNSTEAGQKLFNMLRLGKSEPWTLALENVVGAKNMNVRPLLNYFEPLFTWLKDQNKNSFVGWSTDWSPYADQSIKVRISLKSALGDKAYEWNDNEMYLFRSSVAYAMRQYFLKVKNQMILFGEEDVRVANLKPRISFNFFVTAPKNVSDIIPRTEVEKAIRMSRSRINDAFRLNDNSLEFLGIQPTLGPPNQPPVSESKYGPPCPPCPAPEFLGGPSVFLFPPKPKDTLMISRTPEVTCVVVDVSQEDPEVQFNWYVDGVEVHNAKTKPREEQFNSTYRVVSVLTVLHQDWLNGKEYKCKVSNKGLPSSIEKTISKAKGQPREPQVYTLPPSQEEMTKNQVSLTCLVKGFYPSDIAVEWESNGQPENNYKTTPPVLDSDGSFFLYSRLTVDKSRWQEGNVFSCSVMHEALHNHYTQKSLSLSLGVPLSRTVRCTCISISNQPVNPRSLEKLEIIPASQFCPRVEIIATMKKKGEKRCLNPESKAIKNLLKAVSKERSKRSP

SEQ ID NO: 102 - protein, 1026 aa, artificial
  ACE2 18-740 with IgG1 and IP10
QSTIEEQAKTFLDKFNHEAEDLFYQSSLASWNYNTNITEENVQNMNNAGDKWSAFLKEQSTLAQMYPLQEIQNLTVKLQLQALQQNGSSVLSEDKSKRLNTILNTMSTIYSTGKVCNPDNPQECLLLEPGLNEIMANSLDYNERLWAWESWRSEVGKQLRPLYEEYVVLKNEMARANHYEDYGDYWRGDYEVNGVDGYDYSRGQLIEDVEHTFEEIKPLYEHLHAYVRAKLMNAYPSYISPIGCLPAHLLGDMWGRFWTNLYSLTVPFGQKPNIDVTDAMVDQAWDAQRIFKEAEKFFVSVGLPNMTQGFWENSMLTDPGNVQKAVCHPTAWDLGKGDFRILMCTKVTMDDFLTAHHEMGHIQYDMAYAAQPFLLRNGANEGFHEAVGEIMSLSAATPKHLKSIGLLSPDFQEDNETEINFLLKQALTIVGTLPFTYMLEKWRWMVFKGEIPKDQWMKKWWEMKREIVGVVEPVPHDETYCDPASLFHVSNDYSFIRYYTRTLYQFQFQEALCQAAKHEGPLHKCDISNSTEAGQKLFNMLRLGKSEPWTLALENVVGAKNMNVRPLLNYFEPLFTWLKDQNKNSFVGWSTDWSPYADQSIKVRISLKSALGDKAYEWNDNEMYLFRSSVAYAMRQYFLKVKNQMILFGEEDVRVANLKPRISFNFFVTAPKNVSDIIPRTEVEKAIRMSRSRINDAFRLNDNSLEFLGIQPTLGPPNQPPVSDKTHTCPPCPAPELLGGPSVFLFPPKPKDTLMISRTPEVTCVVVDVSHEDPEVKFNWYVDGVEVHNAKTKPREEQYNSTYRVVSVLTVLHQDWLNGKEYKCKVSNKALPAPIEKTISKAKGQPREPQVYTLPPSRDELTKNQVSLTCLVKGFYPSDIAVEWESNGQPENNYKTTPPVLDSDGSFFLYSKLTVDKSRWQQGNVFSCSVMHEALHNHYTQKSLSLSPGVPLSRTVRCTCISISNQPVNPRSLEKLEIIPASQFCPRVEIIATMKKKGEKRCLNPESKAIKNLLKAVSKERSKRSP

SEQ ID NO: 103 - protein, 1020 aa, artificial
  ACE2 18-732 with IgG4 YTE and IP10
QSTIEEQAKTFLDKFNHEAEDLFYQSSLASWNYNTNITEENVQNMNNAGDKWSAFLKEQSTLAQMYPLQEIQNLTVKLQLQALQQNGSSVLSEDKSKRLNTILNTMSTIYSTGKVCNPDNPQECLLLEPGLNEIMANSLDYNERLWAWESWRSEVGKQLRPLYEEYVVLKNEMARANHYEDYGDYWRGDYEVNGVDGYDYSRGQLIEDVEHTFEEIKPLYEHLHAYVRAKLMNAYPSYISPIGCLPAHLLGDMWGRFWTNLYSLTVPFGQKPNIDVTDAMVDQAWDAQRIFKEAEKFFVSVGLPNMTQGFWENSMLTDPGNVQKAVCHPTAWDLGKGDFRILMCTKVTMDDFLTAHHEMGHIQYDMAYAAQPFLLRNGANEGFHEAVGEIMSLSAATPKHLKSIGLLSPDFQEDNETEINFLLKQALTIVGTLPFTYMLEKWRWMVFKGEIPKDQWMKKWWEMKREIVGVVEPVPHDETYCDPASLFHVSNDYSFIRYYTRTLYQFQFQEALCQAAKHEGPLHKCDISNSTEAGQKLFNMLRLGKSEPWTLALENVVGAKNMNVRPLLNYFEPLFTWLKDQNKNSFVGWSTDWSPYADQSIKVRISLKSALGDKAYEWNDNEMYLFRSSVAYAMRQYFLKVKNQMILFGEEDVRVANLKPRISFNFFVTAPKNVSDIIPRTEVEKAIRMSRSRINDAFRLNDNSLEFLGIQPTLGESKYGPPCPPCPAPEFLGGPSVFLFPPKPKDTLYITREPEVTCVVVDVSQEDPEVQFNWYVDGVEVHNAKTKPREEQFNSTYRVVSVLTVLHQDWLNGKEYKCKVSNKGLPSSIEKTISKAKGQPREPQVYTLPPSQEEMTKNQVSLTCLVKGFYPSDIAVEWESNGQPENNYKTTPPVLDSDGSFFLYSRLTVDKSRWQEGNVFSCSVMHEALHNHYTQKSLSLSLGVPLSRTVRCTCISISNQPVNPRSLEKLEIIPASQFCPRVEIIATMKKKGEKRCLNPESKAIKNLLKAVSKERSKRSP

SEQ ID NO: 104 - protein, 1018 aa, artificial
  ACE2 18-732 IgG1 YTE IP10
QSTIEEQAKTFLDKFNHEAEDLFYQSSLASWNYNTNITEENVQNMNNAGDKWSAFLKEQSTLAQMYPLQEIQNLTVKLQLQALQQNGSSVLSEDKSKRLNTILNTMSTIYSTGKVCNPDNPQECLLLEPGLNEIMANSLDYNERLWAWESWRSEVGKQLRPLYEEYVVLKNEMARANHYEDYGDYWRGDYEVNGVDGYDYSRGQLIEDVEHTFEEIKPLYEHLHAYVRAKLMNAYPSYISPIGCLPAHLLGDMWGRFWTNLYSLTVPFGQKPNIDVTDAMVDQAWDAQRIFKEAEKFFVSVGLPNMTQGFWENSMLTDPGNVQKAVCHPTAWDLGKGDFRILMCTKVTMDDFLTAHHEMGHIQYDMAYAAQPFLLRNGANEGFHEAVGEIMSLSAATPKHLKSIGLLSPDFQEDNETEINFLLKQALTIVGTLPFTYMLEKWRWMVFKGEIPKDQWMKKWWEMKREIVGVVEPVPHDETYCDPASLFHVSNDYSFIRYYTRTLYQFQFQEALCQAAKHEGPLHKCDISNSTEAGQKLFNMLRLGKSEPWTLALENVVGAKNMNVRPLLNYFEPLFTWLKDQNKNSFVGWSTDWSPYADQSIKVRISLKSALGDKAYEWNDNEMYLFRSSVAYAMRQYFLKVKNQMILFGEEDVRVANLKPRISFNFFVTAPKNVSDIIPRTEVEKAIRMSRSRINDAFRLNDNSLEFLGIQPTLGDKTHTCPPCPAPELLGGPSVFLFPPKPKDTLYITREPEVTCVVVDVSHEDPEVKFNWYVDGVEVHNAKTKPREEQYNSTYRVVSVLTVLHQDWLNGKEYKCKVSNKALPAPIEKTISKAKGQPREPQVYTLPPSRDELTKNQVSLTCLVKGFYPSDIAVEWESNGQPENNYKTTPPVLDSDGSFFLYSKLTVDKSRWQQGNVFSCSVMHEALHNHYTQKSLSLSPGVPLSRTVRCTCISISNQPVNPRSLEKLEIIPASQFCPRVEIIATMKKKGEKRCLNPESKAIKNLLKAVSKERSKRSP

SEQ ID NO: 105 - protein, 1028 aa, artificial
  ACE2 18-740 with IgG4 YTE and IP10
QSTIEEQAKTFLDKFNHEAEDLFYQSSLASWNYNTNITEENVQNMNNAGDKWSAFLKEQSTLAQMYPLQEIQNLTVKLQLQALQQNGSSVLSEDKSKRLNTILNTMSTIYSTGKVCNPDNPQECLLLEPGLNEIMANSLDYNERLWAWESWRSEVGKQLRPLYEEYVVLKNEMARANHYEDYGDYWRGDYEVNGVDGYDYSRGQLIEDVEHTFEEIKPLYEHLHAYVRAKLMNAYPSYISPIGCLPAHLLGDMWGRFWTNLYSLTVPFGQKPNIDVTDAMVDQAWDAQRIFKEAEKFFVSVGLPNMTQGFWENSMLTDPGNVQKAVCHPTAWDLGKGDFRILMCTKVTMDDFLTAHHEMGHIQYDMAYAAQPFLLRNGANEGFHEAVGEIMSLSAATPKHLKSIGLLSPDFQEDNETEINFLLKQALTIVGTLPFTYMLEKWRWMVFKGEIPKDQWMKKWWEMKREIVGVVEPVPHDETYCDPASLFHVSNDYSFIRYYTRTLYQFQFQEALCQAAKHEGPLHKCDISNSTEAGQKLFNMLRLGKSEPWTLALENVVGAKNMNVRPLLNYFEPLFTWLKDQNKNSFVGWSTDWSPYADQSIKVRISLKSALGDKAYEWNDNEMYLFRSSVAYAMRQYFLKVKNQMILFGEEDVRVANLKPRISFNFFVTAPKNVSDIIPRTEVEKAIRMSRSRINDAFRLNDNSLEFLGIQPTLGPPNQPPVSESKYGPPCPPCPAPEFLGGPSVFLFPPKPKDTLYITREPEVTCVVVDVSQEDPEVQFNWYVDGVEVHNAKTKPREEQFNSTYRVVSVLTVLHQDWLNGKEYKCKVSNKGLPSSIEKTISKAKGQPREPQVYTLPPSQEEMTKNQVSLTCLVKGFYPSDIAVEWESNGQPENNYKTTPPVLDSDGSFFLYSRLTVDKSRWQEGNVFSCSVMHEALHNHYTQKSLSLSLGVPLSRTVRCTCISISNQPVNPRSLEKLEIIPASQFCPRVEIIATMKKKGEKRCLNPESKAIKNLLKAVSKERSKRSP

SEQ ID NO: 106 - protein, 1026 aa, artificial
  ACE2 18-740 with IgG1 YTE and IP10
QSTIEEQAKTFLDKFNHEAEDLFYQSSLASWNYNTNITEENVQNMNNAGDKWSAFLKEQSTLAQMYPLQEIQNLTVKLQLQALQQNGSSVLSEDKSKRLNTILNTMSTIYSTGKVCNPDNPQECLLLEPGLNEIMANSLDYNERLWAWESWRSEVGKQLRPLYEEYVVLKNEMARANHYEDYGDYWRGDYEVNGVDGYDYSRGQLIEDVEHTFEEIKPLYEHLHAYVRAKLMNAYPSYISPIGCLPAHLLGDMWGRFWTNLYSLTVPFGQKPNIDVTDAMVDQAWDAQRIFKEAEKFFVSVGLPNMTQGFWENSMLTDPGNVQKAVCHPTAWDLGKGDFRILMCTKVTMDDFLTAHHEMGHIQYDMAYAAQPFLLRNGANEGFHEAVGEIMSLSAATPKHLKSIGLLSPDFQEDNETEINFLLKQALTIVGTLPFTYMLEKWRWMVFKGEIPKDQWMKKWWEMKREIVGVVEPVPHDETYCDPASLFHVSNDYSFIRYYTRTLYQFQFQEALCQAAKHEGPLHKCDISNSTEAGQKLFNMLRLGKSEPWTLALENVVGAKNMNVRPLLNYFEPLFTWLKDQNKNSFVGWSTDWSPYADQSIKVRISLKSALGDKAYEWNDNEMYLFRSSVAYAMRQYFLKVKNQMILFGEEDVRVANLKPRISFNFFVTAPKNVSDIIPRTEVEKAIRMSRSRINDAFRLNDNSLEFLGIQPTLGPPNQPPVSDKTHTCPPCPAPELLGGPSVFLFPPKPKDTLYITREPEVTCVVVDVSHEDPEVKFNWYVDGVEVHNAKTKPREEQYNSTYRVVSVLTVLHQDWLNGKEYKCKVSNKALPAPIEKTISKAKGQPREPQVYTLPPSRDELTKNQVSLTCLVKGFYPSDIAVEWESNGQPENNYKTTPPVLDSDGSFFLYSKLTVDKSRWQQGNVFSCSVMHEALHNHYTQKSLSLSPGVPLSRTVRCTCISISNQPVNPRSLEKLEIIPASQFCPRVEIIATMKKKGEKRCLNPESKAIKNLLKAVSKERSKRSP

SEQ ID NO: 107 - protein, 1020 aa, artificial
  ACE2 18-732 with IgG4 T256D T307Q and IP10
QSTIEEQAKTFLDKFNHEAEDLFYQSSLASWNYNTNITEENVQNMNNAGDKWSAFLKEQSTLAQMYPLQEIQNLTVKLQLQALQQNGSSVLSEDKSKRLNTILNTMSTIYSTGKVCNPDNPQECLLLEPGLNEIMANSLDYNERLWAWESWRSEVGKQLRPLYEEYVVLKNEMARANHYEDYGDYWRGDYEVNGVDGYDYSRGQLIEDVEHTFEEIKPLYEHLHAYVRAKLMNAYPSYISPIGCLPAHLLGDMWGRFWTNLYSLTVPFGQKPNIDVTDAMVDQAWDAQRIFKEAEKFFVSVGLPNMTQGFWENSMLTDPGNVQKAVCHPTAWDLGKGDFRILMCTKVTMDDFLTAHHEMGHIQYDMAYAAQPFLLRNGANEGFHEAVGEIMSLSAATPKHLKSIGLLSPDFQEDNETEINFLLKQALTIVGTLPFTYMLEKWRWMVFKGEIPKDQWMKKWWEMKREIVGVVEPVPHDETYCDPASLFHVSNDYSFIRYYTRTLYQFQFQEALCQAAKHEGPLHKCDISNSTEAGQKLFNMLRLGKSEPWTLALENVVGAKNMNVRPLLNYFEPLFTWLKDQNKNSFVGWSTDWSPYADQSIKVRISLKSALGDKAYEWNDNEMYLFRSSVAYAMRQYFLKVKNQMILFGEEDVRVANLKPRISFNFFVTAPKNVSDIIPRTEVEKAIRMSRSRINDAFRLNDNSLEFLGIQPTLGESKYGPPCPPCPAPEFLGGPSVFLFPPKPKDTLMISRDPEVTCVVVDVSQEDPEVQFNWYVDGVEVHNAKTKPREEQFNSTYRVVSVLQVLHQDWLNGKEYKCKVSNKGLPSSIEKTISKAKGQPREPQVYTLPPSQEEMTKNQVSLTCLVKGFYPSDIAVEWESNGQPENNYKTTPPVLDSDGSFFLYSRLTVDKSRWQEGNVFSCSVMHEALHNHYTQKSLSLSLGVPLSRTVRCTCISISNQPVNPRSLEKLEIIPASQFCPRVEIIATMKKKGEKRCLNPESKAIKNLLKAVSKERSKRSP

SEQ ID NO: 108 - protein, 1018 aa, artificial
  ACE2 18-732 with IgG1 T256D T307Q and IP10
QSTIEEQAKTFLDKFNHEAEDLFYQSSLASWNYNTNITEENVQNMNNAGDKWSAFLKEQSTLAQMYPLQEIQNLTVKLQLQALQQNGSSVLSEDKSKRLNTILNTMSTIYSTGKVCNPDNPQECLLLEPGLNEIMANSLDYNERLWAWESWRSEVGKQLRPLYEEYVVLKNEMARANHYEDYGDYWRGDYEVNGVDGYDYSRGQLIEDVEHTFEEIKPLYEHLHAYVRAKLMNAYPSYISPIGCLPAHLLGDMWGRFWTNLYSLTVPFGQKPNIDVTDAMVDQAWDAQRIFKEAEKFFVSVGLPNMTQGFWENSMLTDPGNVQKAVCHPTAWDLGKGDFRILMCTKVTMDDFLTAHHEMGHIQYDMAYAAQPFLLRNGANEGFHEAVGEIMSLSAATPKHLKSIGLLSPDFQEDNETEINFLLKQALTIVGTLPFTYMLEKWRWMVFKGEIPKDQWMKKWWEMKREIVGVVEPVPHDETYCDPASLFHVSNDYSFIRYYTRTLYQFQFQEALCQAAKHEGPLHKCDISNSTEAGQKLFNMLRLGKSEPWTLALENVVGAKNMNVRPLLNYFEPLFTWLKDQNKNSFVGWSTDWSPYADQSIKVRISLKSALGDKAYEWNDNEMYLFRSSVAYAMRQYFLKVKNQMILFGEEDVRVANLKPRISFNFFVTAPKNVSDIIPRTEVEKAIRMSRSRINDAFRLNDNSLEFLGIQPTLGDKTHTCPPCPAPELLGGPSVFLFPPKPKDTLMISRDPEVTCVVVDVSHEDPEVKFNWYVDGVEVHNAKTKPREEQYNSTYRVVSVLQVLHQDWLNGKEYKCKVSNKALPAPIEKTISKAKGQPREPQVYTLPPSRDELTKNQVSLTCLVKGFYPSDIAVEWESNGQPENNYKTTPPVLDSDGSFFLYSKLTVDKSRWQQGNVFSCSVMHEALHNHYTQKSLSLSPGVPLSRTVRCTCISISNQPVNPRSLEKLEIIPASQFCPRVEIIATMKKKGEKRCLNPESKAIKNLLKAVSKERSKRSP

SEQ ID NO: 109 - protein, 1028 aa, artificial
  ACE2 18-740 with IgG4 T256D T307Q and IP10
QSTIEEQAKTFLDKFNHEAEDLFYQSSLASWNYNTNITEENVQNMNNAGDKWSAFLKEQSTLAQMYPLQEIQNLTVKLQLQALQQNGSSVLSEDKSKRLNTILNTMSTIYSTGKVCNPDNPQECLLLEPGLNEIMANSLDYNERLWAWESWRSEVGKQLRPLYEEYVVLKNEMARANHYEDYGDYWRGDYEVNGVDGYDYSRGQLIEDVEHTFEEIKPLYEHLHAYVRAKLMNAYPSYISPIGCLPAHLLGDMWGRFWTNLYSLTVPFGQKPNIDVTDAMVDQAWDAQRIFKEAEKFFVSVGLPNMTQGFWENSMLTDPGNVQKAVCHPTAWDLGKGDFRILMCTKVTMDDFLTAHHEMGHIQYDMAYAAQPFLLRNGANEGFHEAVGEIMSLSAATPKHLKSIGLLSPDFQEDNETEINFLLKQALTIVGTLPFTYMLEKWRWMVFKGEIPKDQWMKKWWEMKREIVGVVEPVPHDETYCDPASLFHVSNDYSFIRYYTRTLYQFQFQEALCQAAKHEGPLHKCDISNSTEAGQKLFNMLRLGKSEPWTLALENVVGAKNMNVRPLLNYFEPLFTWLKDQNKNSFVGWSTDWSPYADQSIKVRISLKSALGDKAYEWNDNEMYLFRSSVAYAMRQYFLKVKNQMILFGEEDVRVANLKPRISFNFFVTAPKNVSDIIPRTEVEKAIRMSRSRINDAFRLNDNSLEFLGIQPTLGPPNQPPVSESKYGPPCPPCPAPEFLGGPSVFLFPPKPKDTLMISRDPEVTCVVVDVSQEDPEVQFNWYVDGVEVHNAKTKPREEQFNSTYRVVSVLQVLHQDWLNGKEYKCKVSNKGLPSSIEKTISKAKGQPREPQVYTLPPSQEEMTKNQVSLTCLVKGFYPSDIAVEWESNGQPENNYKTTPPVLDSDGSFFLYSRLTVDKSRWQEGNVFSCSVMHEALHNHYTQKSLSLSLGVPLSRTVRCTCISISNQPVNPRSLEKLEIIPASQFCPRVEIIATMKKKGEKRCLNPESKAIKNLLKAVSKERSKRSP

SEQ ID NO: 110 - protein, 1026 aa, artificial
  ACE2 18-740 with IgG1 T256D T307Q and IP10
QSTIEEQAKTFLDKFNHEAEDLFYQSSLASWNYNTNITEENVQNMNNAGDKWSAFLKEQSTLAQMYPLQEIQNLTVKLQLQALQQNGSSVLSEDKSKRLNTILNTMSTIYSTGKVCNPDNPQECLLLEPGLNEIMANSLDYNERLWAWESWRSEVGKQLRPLYEEYVVLKNEMARANHYEDYGDYWRGDYEVNGVDGYDYSRGQLIEDVEHTFEEIKPLYEHLHAYVRAKLMNAYPSYISPIGCLPAHLLGDMWGRFWTNLYSLTVPFGQKPNIDVTDAMVDQAWDAQRIFKEAEKFFVSVGLPNMTQGFWENSMLTDPGNVQKAVCHPTAWDLGKGDFRILMCTKVTMDDFLTAHHEMGHIQYDMAYAAQPFLLRNGANEGFHEAVGEIMSLSAATPKHLKSIGLLSPDFQEDNETEINFLLKQALTIVGTLPFTYMLEKWRWMVFKGEIPKDQWMKKWWEMKREIVGVVEPVPHDETYCDPASLFHVSNDYSFIRYYTRTLYQFQFQEALCQAAKHEGPLHKCDISNSTEAGQKLFNMLRLGKSEPWTLALENVVGAKNMNVRPLLNYFEPLFTWLKDQNKNSFVGWSTDWSPYADQSIKVRISLKSALGDKAYEWNDNEMYLFRSSVAYAMRQYFLKVKNQMILFGEEDVRVANLKPRISFNFFVTAPKNVSDIIPRTEVEKAIRMSRSRINDAFRLNDNSLEFLGIQPTLGPPNQPPVSDKTHTCPPCPAPELLGGPSVFLFPPKPKDTLMISRDPEVTCVVVDVSHEDPEVKFNWYVDGVEVHNAKTKPREEQYNSTYRVVSVLQVLHQDWLNGKEYKCKVSNKALPAPIEKTISKAKGQPREPQVYTLPPSRDELTKNQVSLTCLVKGFYPSDIAVEWESNGQPENNYKTTPPVLDSDGSFFLYSKLTVDKSRWQQGNVFSCSVMHEALHNHYTQKSLSLSPGVPLSRTVRCTCISISNQPVNPRSLEKLEIIPASQFCPRVEIIATMKKKGEKRCLNPESKAIKNLLKAVSKERSKRSP

SEQ ID NO: 111 - protein, 1020 aa, artificial
  ACE2 18-732 H374N H378N with IgG4 wt and IP10
QSTIEEQAKTFLDKFNHEAEDLFYQSSLASWNYNTNITEENVQNMNNAGDKWSAFLKEQSTLAQMYPLQEIQNLTVKLQLQALQQNGSSVLSEDKSKRLNTILNTMSTIYSTGKVCNPDNPQECLLLEPGLNEIMANSLDYNERLWAWESWRSEVGKQLRPLYEEYVVLKNEMARANHYEDYGDYWRGDYEVNGVDGYDYSRGQLIEDVEHTFEEIKPLYEHLHAYVRAKLMNAYPSYISPIGCLPAHLLGDMWGRFWTNLYSLTVPFGQKPNIDVTDAMVDQAWDAQRIFKEAEKFFVSVGLPNMTQGFWENSMLTDPGNVQKAVCHPTAWDLGKGDFRILMCTKVTMDDFLTAHNEMGNIQYDMAYAAQPFLLRNGANEGFHEAVGEIMSLSAATPKHLKSIGLLSPDFQEDNETEINFLLKQALTIVGTLPFTYMLEKWRWMVFKGEIPKDQWMKKWWEMKREIVGVVEPVPHDETYCDPASLFHVSNDYSFIRYYTRTLYQFQFQEALCQAAKHEGPLHKCDISNSTEAGQKLFNMLRLGKSEPWTLALENVVGAKNMNVRPLLNYFEPLFTWLKDQNKNSFVGWSTDWSPYADQSIKVRISLKSALGDKAYEWNDNEMYLFRSSVAYAMRQYFLKVKNQMILFGEEDVRVANLKPRISFNFFVTAPKNVSDIIPRTEVEKAIRMSRSRINDAFRLNDNSLEFLGIQPTLGESKYGPPCPPCPAPEFLGGPSVFLFPPKPKDTLMISRTPEVTCVVVDVSQEDPEVQFNWYVDGVEVHNAKTKPREEQFNSTYRVVSVLTVLHQDWLNGKEYKCKVSNKGLPSSIEKTISKAKGQPREPQVYTLPPSQEEMTKNQVSLTCLVKGFYPSDIAVEWESNGQPENNYKTTPPVLDSDGSFFLYSRLTVDKSRWQEGNVFSCSVMHEALHNHYTQKSLSLSLGVPLSRTVRCTCISISNQPVNPRSLEKLEIIPASQFCPRVEIIATMKKKGEKRCLNPESKAIKNLLKAVSKERSKRSP

SEQ ID NO: 112 - protein, 1018 aa, artificial
  ACE2 18-732 H374N H378N with IgG1 wt and IP10
QSTIEEQAKTFLDKFNHEAEDLFYQSSLASWNYNTNITEENVQNMNNAGDKWSAFLKEQSTLAQMYPLQEIQNLTVKLQLQALQQNGSSVLSEDKSKRLNTILNTMSTIYSTGKVCNPDNPQECLLLEPGLNEIMANSLDYNERLWAWESWRSEVGKQLRPLYEEYVVLKNEMARANHYEDYGDYWRGDYEVNGVDGYDYSRGQLIEDVEHTFEEIKPLYEHLHAYVRAKLMNAYPSYISPIGCLPAHLLGDMWGRFWTNLYSLTVPFGQKPNIDVTDAMVDQAWDAQRIFKEAEKFFVSVGLPNMTQGFWENSMLTDPGNVQKAVCHPTAWDLGKGDFRILMCTKVTMDDFLTAHNEMGNIQYDMAYAAQPFLLRNGANEGFHEAVGEIMSLSAATPKHLKSIGLLSPDFQEDNETEINFLLKQALTIVGTLPFTYMLEKWRWMVFKGEIPKDQWMKKWWEMKREIVGVVEPVPHDETYCDPASLFHVSNDYSFIRYYTRTLYQFQFQEALCQAAKHEGPLHKCDISNSTEAGQKLFNMLRLGKSEPWTLALENVVGAKNMNVRPLLNYFEPLFTWLKDQNKNSFVGWSTDWSPYADQSIKVRISLKSALGDKAYEWNDNEMYLFRSSVAYAMRQYFLKVKNQMILFGEEDVRVANLKPRISFNFFVTAPKNVSDIIPRTEVEKAIRMSRSRINDAFRLNDNSLEFLGIQPTLGDKTHTCPPCPAPELLGGPSVFLFPPKPKDTLMISRTPEVTCVVVDVSHEDPEVKFNWYVDGVEVHNAKTKPREEQYNSTYRVVSVLTVLHQDWLNGKEYKCKVSNKALPAPIEKTISKAKGQPREPQVYTLPPSRDELTKNQVSLTCLVKGFYPSDIAVEWESNGQPENNYKTTPPVLDSDGSFFLYSKLTVDKSRWQQGNVFSCSVMHEALHNHYTQKSLSLSPGVPLSRTVRCTCISISNQPVNPRSLEKLEIIPASQFCPRVEIIATMKKKGEKRCLNPESKAIKNLLKAVSKERSKRSP

SEQ ID NO: 113 - protein, 1028 aa, artificial
  ACE2 18-740 H374N H378N with IgG4 wt and IP10
QSTIEEQAKTFLDKFNHEAEDLFYQSSLASWNYNTNITEENVQNMNNAGDKWSAFLKEQSTLAQMYPLQEIQNLTVKLQLQALQQNGSSVLSEDKSKRLNTILNTMSTIYSTGKVCNPDNPQECLLLEPGLNEIMANSLDYNERLWAWESWRSEVGKQLRPLYEEYVVLKNEMARANHYEDYGDYWRGDYEVNGVDGYDYSRGQLIEDVEHTFEEIKPLYEHLHAYVRAKLMNAYPSYISPIGCLPAHLLGDMWGRFWTNLYSLTVPFGQKPNIDVTDAMVDQAWDAQRIFKEAEKFFVSVGLPNMTQGFWENSMLTDPGNVQKAVCHPTAWDLGKGDFRILMCTKVTMDDFLTAHNEMGNIQYDMAYAAQPFLLRNGANEGFHEAVGEIMSLSAATPKHLKSIGLLSPDFQEDNETEINFLLKQALTIVGTLPFTYMLEKWRWMVFKGEIPKDQWMKKWWEMKREIVGVVEPVPHDETYCDPASLFHVSNDYSFIRYYTRTLYQFQFQEALCQAAKHEGPLHKCDISNSTEAGQKLFNMLRLGKSEPWTLALENVVGAKNMNVRPLLNYFEPLFTWLKDQNKNSFVGWSTDWSPYADQSIKVRISLKSALGDKAYEWNDNEMYLFRSSVAYAMRQYFLKVKNQMILFGEEDVRVANLKPRISFNFFVTAPKNVSDIIPRTEVEKAIRMSRSRINDAFRLNDNSLEFLGIQPTLGPPNQPPVSESKYGPPCPPCPAPEFLGGPSVFLFPPKPKDTLMISRTPEVTCVVVDVSQEDPEVQFNWYVDGVEVHNAKTKPREEQFNSTYRVVSVLTVLHQDWLNGKEYKCKVSNKGLPSSIEKTISKAKGQPREPQVYTLPPSQEEMTKNQVSLTCLVKGFYPSDIAVEWESNGQPENNYKTTPPVLDSDGSFFLYSRLTVDKSRWQEGNVFSCSVMHEALHNHYTQKSLSLSLGVPLSRTVRCTCISISNQPVNPRSLEKLEIIPASQFCPRVEIIATMKKKGEKRCLNPESKAIKNLLKAVSKERSKRSP

SEQ ID NO: 114 - protein, 1026 aa, artificial
  ACE2 18-740 H374N H378N with IgG1 wt and IP10
QSTIEEQAKTFLDKFNHEAEDLFYQSSLASWNYNTNITEENVQNMNNAGDKWSAFLKEQSTLAQMYPLQEIQNLTVKLQLQALQQNGSSVLSEDKSKRLNTILNTMSTIYSTGKVCNPDNPQECLLLEPGLNEIMANSLDYNERLWAWESWRSEVGKQLRPLYEEYVVLKNEMARANHYEDYGDYWRGDYEVNGVDGYDYSRGQLIEDVEHTFEEIKPLYEHLHAYVRAKLMNAYPSYISPIGCLPAHLLGDMWGRFWTNLYSLTVPFGQKPNIDVTDAMVDQAWDAQRIFKEAEKFFVSVGLPNMTQGFWENSMLTDPGNVQKAVCHPTAWDLGKGDFRILMCTKVTMDDFLTAHNEMGNIQYDMAYAAQPFLLRNGANEGFHEAVGEIMSLSAATPKHLKSIGLLSPDFQEDNETEINFLLKQALTIVGTLPFTYMLEKWRWMVFKGEIPKDQWMKKWWEMKREIVGVVEPVPHDETYCDPASLFHVSNDYSFIRYYTRTLYQFQFQEALCQAAKHEGPLHKCDISNSTEAGQKLFNMLRLGKSEPWTLALENVVGAKNMNVRPLLNYFEPLFTWLKDQNKNSFVGWSTDWSPYADQSIKVRISLKSALGDKAYEWNDNEMYLFRSSVAYAMRQYFLKVKNQMILFGEEDVRVANLKPRISFNFFVTAPKNVSDIIPRTEVEKAIRMSRSRINDAFRLNDNSLEFLGIQPTLGPPNQPPVSDKTHTCPPCPAPELLGGPSVFLFPPKPKDTLMISRTPEVTCVVVDVSHEDPEVKFNWYVDGVEVHNAKTKPREEQYNSTYRVVSVLTVLHQDWLNGKEYKCKVSNKALPAPIEKTISKAKGQPREPQVYTLPPSRDELTKNQVSLTCLVKGFYPSDIAVEWESNGQPENNYKTTPPVLDSDGSFFLYSKLTVDKSRWQQGNVFSCSVMHEALHNHYTQKSLSLSPGVPLSRTVRCTCISISNQPVNPRSLEKLEIIPASQFCPRVEIIATMKKKGEKRCLNPESKAIKNLLKAVSKERSKRSP

SEQ ID NO: 115 - protein, 1020 aa, artificial
  ACE2 18-732 H374N H378N with IgG4 YTE and IP10
QSTIEEQAKTFLDKFNHEAEDLFYQSSLASWNYNTNITEENVQNMNNAGDKWSAFLKEQSTLAQMYPLQEIQNLTVKLQLQALQQNGSSVLSEDKSKRLNTILNTMSTIYSTGKVCNPDNPQECLLLEPGLNEIMANSLDYNERLWAWESWRSEVGKQLRPLYEEYVVLKNEMARANHYEDYGDYWRGDYEVNGVDGYDYSRGQLIEDVEHTFEEIKPLYEHLHAYVRAKLMNAYPSYISPIGCLPAHLLGDMWGRFWTNLYSLTVPFGQKPNIDVTDAMVDQAWDAQRIFKEAEKFFVSVGLPNMTQGFWENSMLTDPGNVQKAVCHPTAWDLGKGDFRILMCTKVTMDDFLTAHNEMGNIQYDMAYAAQPFLLRNGANEGFHEAVGEIMSLSAATPKHLKSIGLLSPDFQEDNETEINFLLKQALTIVGTLPFTYMLEKWRWMVFKGEIPKDQWMKKWWEMKREIVGVVEPVPHDETYCDPASLFHVSNDYSFIRYYTRTLYQFQFQEALCQAAKHEGPLHKCDISNSTEAGQKLFNMLRLGKSEPWTLALENVVGAKNMNVRPLLNYFEPLFTWLKDQNKNSFVGWSTDWSPYADQSIKVRISLKSALGDKAYEWNDNEMYLFRSSVAYAMRQYFLKVKNQMILFGEEDVRVANLKPRISFNFFVTAPKNVSDIIPRTEVEKAIRMSRSRINDAFRLNDNSLEFLGIQPTLGESKYGPPCPPCPAPEFLGGPSVFLFPPKPKDTLYITREPEVTCVVVDVSQEDPEVQFNWYVDGVEVHNAKTKPREEQFNSTYRVVSVLTVLHQDWLNGKEYKCKVSNKGLPSSIEKTISKAKGQPREPQVYTLPPSQEEMTKNQVSLTCLVKGFYPSDIAVEWESNGQPENNYKTTPPVLDSDGSFFLYSRLTVDKSRWQEGNVFSCSVMHEALHNHYTQKSLSLSLGVPLSRTVRCTCISISNQPVNPRSLEKLEIIPASQFCPRVEIIATMKKKGEKRCLNPESKAIKNLLKAVSKERSKRSP

SEQ ID NO: 116 - protein, 1018 aa, artificial
  ACE2 18-732 H374N H378N with IgG1 YTE and IP10
QSTIEEQAKTFLDKFNHEAEDLFYQSSLASWNYNTNITEENVQNMNNAGDKWSAFLKEQSTLAQMYPLQEIQNLTVKLQLQALQQNGSSVLSEDKSKRLNTILNTMSTIYSTGKVCNPDNPQECLLLEPGLNEIMANSLDYNERLWAWESWRSEVGKQLRPLYEEYVVLKNEMARANHYEDYGDYWRGDYEVNGVDGYDYSRGQLIEDVEHTFEEIKPLYEHLHAYVRAKLMNAYPSYISPIGCLPAHLLGDMWGRFWTNLYSLTVPFGQKPNIDVTDAMVDQAWDAQRIFKEAEKFFVSVGLPNMTQGFWENSMLTDPGNVQKAVCHPTAWDLGKGDFRILMCTKVTMDDFLTAHNEMGNIQYDMAYAAQPFLLRNGANEGFHEAVGEIMSLSAATPKHLKSIGLLSPDFQEDNETEINFLLKQALTIVGTLPFTYMLEKWRWMVFKGEIPKDQWMKKWWEMKREIVGVVEPVPHDETYCDPASLFHVSNDYSFIRYYTRTLYQFQFQEALCQAAKHEGPLHKCDISNSTEAGQKLFNMLRLGKSEPWTLALENVVGAKNMNVRPLLNYFEPLFTWLKDQNKNSFVGWSTDWSPYADQSIKVRISLKSALGDKAYEWNDNEMYLFRSSVAYAMRQYFLKVKNQMILFGEEDVRVANLKPRISFNFFVTAPKNVSDIIPRTEVEKAIRMSRSRINDAFRLNDNSLEFLGIQPTLGDKTHTCPPCPAPELLGGPSVFLFPPKPKDTLYITREPEVTCVVVDVSHEDPEVKFNWYVDGVEVHNAKTKPREEQYNSTYRVVSVLTVLHQDWLNGKEYKCKVSNKALPAPIEKTISKAKGQPREPQVYTLPPSRDELTKNQVSLTCLVKGFYPSDIAVEWESNGQPENNYKTTPPVLDSDGSFFLYSKLTVDKSRWQQGNVFSCSVMHEALHNHYTQKSLSLSPGVPLSRTVRCTCISISNQPVNPRSLEKLEIIPASQFCPRVEIIATMKKKGEKRCLNPESKAIKNLLKAVSKERSKRSP

SEQ ID NO: 117 - protein, 1028 aa, artificial
  ACE2 18-740 H374N H378N with IgG4 YTE and IP10
QSTIEEQAKTFLDKFNHEAEDLFYQSSLASWNYNTNITEENVQNMNNAGDKWSAFLKEQSTLAQMYPLQEIQNLTVKLQLQALQQNGSSVLSEDKSKRLNTILNTMSTIYSTGKVCNPDNPQECLLLEPGLNEIMANSLDYNERLWAWESWRSEVGKQLRPLYEEYVVLKNEMARANHYEDYGDYWRGDYEVNGVDGYDYSRGQLIEDVEHTFEEIKPLYEHLHAYVRAKLMNAYPSYISPIGCLPAHLLGDMWGRFWTNLYSLTVPFGQKPNIDVTDAMVDQAWDAQRIFKEAEKFFVSVGLPNMTQGFWENSMLTDPGNVQKAVCHPTAWDLGKGDFRILMCTKVTMDDFLTAHNEMGNIQYDMAYAAQPFLLRNGANEGFHEAVGEIMSLSAATPKHLKSIGLLSPDFQEDNETEINFLLKQALTIVGTLPFTYMLEKWRWMVFKGEIPKDQWMKKWWEMKREIVGVVEPVPHDETYCDPASLFHVSNDYSFIRYYTRTLYQFQFQEALCQAAKHEGPLHKCDISNSTEAGQKLFNMLRLGKSEPWTLALENVVGAKNMNVRPLLNYFEPLFTWLKDQNKNSFVGWSTDWSPYADQSIKVRISLKSALGDKAYEWNDNEMYLFRSSVAYAMRQYFLKVKNQMILFGEEDVRVANLKPRISFNFFVTAPKNVSDIIPRTEVEKAIRMSRSRINDAFRLNDNSLEFLGIQPTLGPPNQPPVSESKYGPPCPPCPAPEFLGGPSVFLFPPKPKDTLYITREPEVTCVVVDVSQEDPEVQFNWYVDGVEVHNAKTKPREEQFNSTYRVVSVLTVLHQDWLNGKEYKCKVSNKGLPSSIEKTISKAKGQPREPQVYTLPPSQEEMTKNQVSLTCLVKGFYPSDIAVEWESNGQPENNYKTTPPVLDSDGSFFLYSRLTVDKSRWQEGNVFSCSVMHEALHNHYTQKSLSLSLGVPLSRTVRCTCISISNQPVNPRSLEKLEIIPASQFCPRVEIIATMKKKGEKRCLNPESKAIKNLLKAVSKERSKRSP

SEQ ID NO: 118 - protein, 1026 aa, artificial
  ACE2 18-740 H374N H378N with IgG1 YTE and IP10
QSTIEEQAKTFLDKFNHEAEDLFYQSSLASWNYNTNITEENVQNMNNAGDKWSAFLKEQSTLAQMYPLQEIQNLTVKLQLQALQQNGSSVLSEDKSKRLNTILNTMSTIYSTGKVCNPDNPQECLLLEPGLNEIMANSLDYNERLWAWESWRSEVGKQLRPLYEEYVVLKNEMARANHYEDYGDYWRGDYEVNGVDGYDYSRGQLIEDVEHTFEEIKPLYEHLHAYVRAKLMNAYPSYISPIGCLPAHLLGDMWGRFWTNLYSLTVPFGQKPNIDVTDAMVDQAWDAQRIFKEAEKFFVSVGLPNMTQGFWENSMLTDPGNVQKAVCHPTAWDLGKGDFRILMCTKVTMDDFLTAHNEMGNIQYDMAYAAQPFLLRNGANEGFHEAVGEIMSLSAATPKHLKSIGLLSPDFQEDNETEINFLLKQALTIVGTLPFTYMLEKWRWMVFKGEIPKDQWMKKWWEMKREIVGVVEPVPHDETYCDPASLFHVSNDYSFIRYYTRTLYQFQFQEALCQAAKHEGPLHKCDISNSTEAGQKLFNMLRLGKSEPWTLALENVVGAKNMNVRPLLNYFEPLFTWLKDQNKNSFVGWSTDWSPYADQSIKVRISLKSALGDKAYEWNDNEMYLFRSSVAYAMRQYFLKVKNQMILFGEEDVRVANLKPRISFNFFVTAPKNVSDIIPRTEVEKAIRMSRSRINDAFRLNDNSLEFLGIQPTLGPPNQPPVSDKTHTCPPCPAPELLGGPSVFLFPPKPKDTLYITREPEVTCVVVDVSHEDPEVKFNWYVDGVEVHNAKTKPREEQYNSTYRVVSVLTVLHQDWLNGKEYKCKVSNKALPAPIEKTISKAKGQPREPQVYTLPPSRDELTKNQVSLTCLVKGFYPSDIAVEWESNGQPENNYKTTPPVLDSDGSFFLYSKLTVDKSRWQQGNVFSCSVMHEALHNHYTQKSLSLSPGVPLSRTVRCTCISISNQPVNPRSLEKLEIIPASQFCPRVEIIATMKKKGEKRCLNPESKAIKNLLKAVSKERSKRSP

SEQ ID NO: 119 - protein, 1020 aa, artificial
  ACE2 18-732 H374N H378N with IgG4 T256D T307Q and IP10
QSTIEEQAKTFLDKFNHEAEDLFYQSSLASWNYNTNITEENVQNMNNAGDKWSAFLKEQSTLAQMYPLQEIQNLTVKLQLQALQQNGSSVLSEDKSKRLNTILNTMSTIYSTGKVCNPDNPQECLLLEPGLNEIMANSLDYNERLWAWESWRSEVGKQLRPLYEEYVVLKNEMARANHYEDYGDYWRGDYEVNGVDGYDYSRGQLIEDVEHTFEEIKPLYEHLHAYVRAKLMNAYPSYISPIGCLPAHLLGDMWGRFWTNLYSLTVPFGQKPNIDVTDAMVDQAWDAQRIFKEAEKFFVSVGLPNMTQGFWENSMLTDPGNVQKAVCHPTAWDLGKGDFRILMCTKVTMDDFLTAHNEMGNIQYDMAYAAQPFLLRNGANEGFHEAVGEIMSLSAATPKHLKSIGLLSPDFQEDNETEINFLLKQALTIVGTLPFTYMLEKWRWMVFKGEIPKDQWMKKWWEMKREIVGVVEPVPHDETYCDPASLFHVSNDYSFIRYYTRTLYQFQFQEALCQAAKHEGPLHKCDISNSTEAGQKLFNMLRLGKSEPWTLALENVVGAKNMNVRPLLNYFEPLFTWLKDQNKNSFVGWSTDWSPYADQSIKVRISLKSALGDKAYEWNDNEMYLFRSSVAYAMRQYFLKVKNQMILFGEEDVRVANLKPRISFNFFVTAPKNVSDIIPRTEVEKAIRMSRSRINDAFRLNDNSLEFLGIQPTLGESKYGPPCPPCPAPEFLGGPSVFLFPPKPKDTLMISRDPEVTCVVVDVSQEDPEVQFNWYVDGVEVHNAKTKPREEQFNSTYRVVSVLQVLHQDWLNGKEYKCKVSNKGLPSSIEKTISKAKGQPREPQVYTLPPSQEEMTKNQVSLTCLVKGFYPSDIAVEWESNGQPENNYKTTPPVLDSDGSFFLYSRLTVDKSRWQEGNVFSCSVMHEALHNHYTQKSLSLSLGVPLSRTVRCTCISISNQPVNPRSLEKLEIIPASQFCPRVEIIATMKKKGEKRCLNPESKAIKNLLKAVSKERSKRSP

SEQ ID NO: 120 - protein, 1018 aa, artificial
  ACE2 18-732 H374N H378N with IgG1 T256D T307Q and IP10
QSTIEEQAKTFLDKFNHEAEDLFYQSSLASWNYNTNITEENVQNMNNAGDKWSAFLKEQSTLAQMYPLQEIQNLTVKLQLQALQQNGSSVLSEDKSKRLNTILNTMSTIYSTGKVCNPDNPQECLLLEPGLNEIMANSLDYNERLWAWESWRSEVGKQLRPLYEEYVVLKNEMARANHYEDYGDYWRGDYEVNGVDGYDYSRGQLIEDVEHTFEEIKPLYEHLHAYVRAKLMNAYPSYISPIGCLPAHLLGDMWGRFWTNLYSLTVPFGQKPNIDVTDAMVDQAWDAQRIFKEAEKFFVSVGLPNMTQGFWENSMLTDPGNVQKAVCHPTAWDLGKGDFRILMCTKVTMDDFLTAHNEMGNIQYDMAYAAQPFLLRNGANEGFHEAVGEIMSLSAATPKHLKSIGLLSPDFQEDNETEINFLLKQALTIVGTLPFTYMLEKWRWMVFKGEIPKDQWMKKWWEMKREIVGVVEPVPHDETYCDPASLFHVSNDYSFIRYYTRTLYQFQFQEALCQAAKHEGPLHKCDISNSTEAGQKLFNMLRLGKSEPWTLALENVVGAKNMNVRPLLNYFEPLFTWLKDQNKNSFVGWSTDWSPYADQSIKVRISLKSALGDKAYEWNDNEMYLFRSSVAYAMRQYFLKVKNQMILFGEEDVRVANLKPRISFNFFVTAPKNVSDIIPRTEVEKAIRMSRSRINDAFRLNDNSLEFLGIQPTLGDKTHTCPPCPAPELLGGPSVFLFPPKPKDTLMISRDPEVTCVVVDVSHEDPEVKFNWYVDGVEVHNAKTKPREEQYNSTYRVVSVLQVLHQDWLNGKEYKCKVSNKALPAPIEKTISKAKGQPREPQVYTLPPSRDELTKNQVSLTCLVKGFYPSDIAVEWESNGQPENNYKTTPPVLDSDGSFFLYSKLTVDKSRWQQGNVFSCSVMHEALHNHYTQKSLSLSPGVPLSRTVRCTCISISNQPVNPRSLEKLEIIPASQFCPRVEIIATMKKKGEKRCLNPESKAIKNLLKAVSKERSKRSP

SEQ ID NO: 121 - protein, 1028 aa, artificial
  ACE2 18-740 H374N H378N with IgG4 T256D T307Q and IP10
QSTIEEQAKTFLDKFNHEAEDLFYQSSLASWNYNTNITEENVQNMNNAGDKWSAFLKEQSTLAQMYPLQEIQNLTVKLQLQALQQNGSSVLSEDKSKRLNTILNTMSTIYSTGKVCNPDNPQECLLLEPGLNEIMANSLDYNERLWAWESWRSEVGKQLRPLYEEYVVLKNEMARANHYEDYGDYWRGDYEVNGVDGYDYSRGQLIEDVEHTFEEIKPLYEHLHAYVRAKLMNAYPSYISPIGCLPAHLLGDMWGRFWTNLYSLTVPFGQKPNIDVTDAMVDQAWDAQRIFKEAEKFFVSVGLPNMTQGFWENSMLTDPGNVQKAVCHPTAWDLGKGDFRILMCTKVTMDDFLTAHNEMGNIQYDMAYAAQPFLLRNGANEGFHEAVGEIMSLSAATPKHLKSIGLLSPDFQEDNETEINFLLKQALTIVGTLPFTYMLEKWRWMVFKGEIPKDQWMKKWWEMKREIVGVVEPVPHDETYCDPASLFHVSNDYSFIRYYTRTLYQFQFQEALCQAAKHEGPLHKCDISNSTEAGQKLFNMLRLGKSEPWTLALENVVGAKNMNVRPLLNYFEPLFTWLKDQNKNSFVGWSTDWSPYADQSIKVRISLKSALGDKAYEWNDNEMYLFRSSVAYAMRQYFLKVKNQMILFGEEDVRVANLKPRISFNFFVTAPKNVSDIIPRTEVEKAIRMSRSRINDAFRLNDNSLEFLGIQPTLGPPNQPPVSESKYGPPCPPCPAPEFLGGPSVFLFPPKPKDTLMISRDPEVTCVVVDVSQEDPEVQFNWYVDGVEVHNAKTKPREEQFNSTYRVVSVLQVLHQDWLNGKEYKCKVSNKGLPSSIEKTISKAKGQPREPQVYTLPPSQEEMTKNQVSLTCLVKGFYPSDIAVEWESNGQPENNYKTTPPVLDSDGSFFLYSRLTVDKSRWQEGNVFSCSVMHEALHNHYTQKSLSLSLGVPLSRTVRCTCISISNQPVNPRSLEKLEIIPASQFCPRVEIIATMKKKGEKRCLNPESKAIKNLLKAVSKERSKRSP

SEQ ID NO: 122 - protein, 1026 aa, artificial
  ACE2 18-740 H 374N H378N with IgG1 T256D T307Q and IP10
QSTIEEQAKTFLDKFNHEAEDLFYQSSLASWNYNTNITEENVQNMNNAGDKWSAFLKEQSTLAQMYPLQEIQNLTVKLQLQALQQNGSSVLSEDKSKRLNTILNTMSTIYSTGKVCNPDNPQECLLLEPGLNEIMANSLDYNERLWAWESWRSEVGKQLRPLYEEYVVLKNEMARANHYEDYGDYWRGDYEVNGVDGYDYSRGQLIEDVEHTFEEIKPLYEHLHAYVRAKLMNAYPSYISPIGCLPAHLLGDMWGRFWTNLYSLTVPFGQKPNIDVTDAMVDQAWDAQRIFKEAEKFFVSVGLPNMTQGFWENSMLTDPGNVQKAVCHPTAWDLGKGDFRILMCTKVTMDDFLTAHNEMGNIQYDMAYAAQPFLLRNGANEGFHEAVGEIMSLSAATPKHLKSIGLLSPDFQEDNETEINFLLKQALTIVGTLPFTYMLEKWRWMVFKGEIPKDQWMKKWWEMKREIVGVVEPVPHDETYCDPASLFHVSNDYSFIRYYTRTLYQFQFQEALCQAAKHEGPLHKCDISNSTEAGQKLFNMLRLGKSEPWTLALENVVGAKNMNVRPLLNYFEPLFTWLKDQNKNSFVGWSTDWSPYADQSIKVRISLKSALGDKAYEWNDNEMYLFRSSVAYAMRQYFLKVKNQMILFGEEDVRVANLKPRISFNFFVTAPKNVSDIIPRTEVEKAIRMSRSRINDAFRLNDNSLEFLGIQPTLGPPNQPPVSDKTHTCPPCPAPELLGGPSVFLFPPKPKDTLMISRDPEVTCVVVDVSHEDPEVKFNWYVDGVEVHNAKTKPREEQYNSTYRVVSVLQVLHQDWLNGKEYKCKVSNKALPAPIEKTISKAKGQPREPQVYTLPPSRDELTKNQVSLTCLVKGFYPSDIAVEWESNGQPENNYKTTPPVLDSDGSFFLYSKLTVDKSRWQQGNVFSCSVMHEALHNHYTQKSLSLSPGVPLSRTVRCTCISISNQPVNPRSLEKLEIIPASQFCPRVEIIATMKKKGEKRCLNPESKAIKNLLKAVSKERSKRSP

SEQ ID NO: 123 - protein, 1020 aa, artificial
  ACE2 18-732 R273A with IgG4 wt and IP10
QSTIEEQAKTFLDKFNHEAEDLFYQSSLASWNYNTNITEENVQNMNNAGDKWSAFLKEQSTLAQMYPLQEIQNLTVKLQLQALQQNGSSVLSEDKSKRLNTILNTMSTIYSTGKVCNPDNPQECLLLEPGLNEIMANSLDYNERLWAWESWRSEVGKQLRPLYEEYVVLKNEMARANHYEDYGDYWRGDYEVNGVDGYDYSRGQLIEDVEHTFEEIKPLYEHLHAYVRAKLMNAYPSYISPIGCLPAHLLGDMWGAFWTNLYSLTVPFGQKPNIDVTDAMVDQAWDAQRIFKEAEKFFVSVGLPNMTQGFWENSMLTDPGNVQKAVCHPTAWDLGKGDFRILMCTKVTMDDFLTAHHEMGHIQYDMAYAAQPFLLRNGANEGFHEAVGEIMSLSAATPKHLKSIGLLSPDFQEDNETEINFLLKQALTIVGTLPFTYMLEKWRWMVFKGEIPKDQWMKKWWEMKREIVGVVEPVPHDETYCDPASLFHVSNDYSFIRYYTRTLYQFQFQEALCQAAKHEGPLHKCDISNSTEAGQKLFNMLRLGKSEPWTLALENVVGAKNMNVRPLLNYFEPLFTWLKDQNKNSFVGWSTDWSPYADQSIKVRISLKSALGDKAYEWNDNEMYLFRSSVAYAMRQYFLKVKNQMILFGEEDVRVANLKPRISFNFFVTAPKNVSDIIPRTEVEKAIRMSRSRINDAFRLNDNSLEFLGIQPTLGESKYGPPCPPCPAPEFLGGPSVFLFPPKPKDTLMISRTPEVTCVVVDVSQEDPEVQFNWYVDGVEVHNAKTKPREEQFNSTYRVVSVLTVLHQDWLNGKEYKCKVSNKGLPSSIEKTISKAKGQPREPQVYTLPPSQEEMTKNQVSLTCLVKGFYPSDIAVEWESNGQPENNYKTTPPVLDSDGSFFLYSRLTVDKSRWQEGNVFSCSVMHEALHNHYTQKSLSLSLGVPLSRTVRCTCISISNQPVNPRSLEKLEIIPASQFCPRVEIIATMKKKGEKRCLNPESKAIKNLLKAVSKERSKRSP

SEQ ID NO: 124 - protein, 1018 aa, artificial
  ACE2 18-732 R273A with IgG1 wt and IP10
QSTIEEQAKTFLDKFNHEAEDLFYQSSLASWNYNTNITEENVQNMNNAGDKWSAFLKEQSTLAQMYPLQEIQNLTVKLQLQALQQNGSSVLSEDKSKRLNTILNTMSTIYSTGKVCNPDNPQECLLLEPGLNEIMANSLDYNERLWAWESWRSEVGKQLRPLYEEYVVLKNEMARANHYEDYGDYWRGDYEVNGVDGYDYSRGQLIEDVEHTFEEIKPLYEHLHAYVRAKLMNAYPSYISPIGCLPAHLLGDMWGAFWTNLYSLTVPFGQKPNIDVTDAMVDQAWDAQRIFKEAEKFFVSVGLPNMTQGFWENSMLTDPGNVQKAVCHPTAWDLGKGDFRILMCTKVTMDDFLTAHHEMGHIQYDMAYAAQPFLLRNGANEGFHEAVGEIMSLSAATPKHLKSIGLLSPDFQEDNETEINFLLKQALTIVGTLPFTYMLEKWRWMVFKGEIPKDQWMKKWWEMKREIVGVVEPVPHDETYCDPASLFHVSNDYSFIRYYTRTLYQFQFQEALCQAAKHEGPLHKCDISNSTEAGQKLFNMLRLGKSEPWTLALENVVGAKNMNVRPLLNYFEPLFTWLKDQNKNSFVGWSTDWSPYADQSIKVRISLKSALGDKAYEWNDNEMYLFRSSVAYAMRQYFLKVKNQMILFGEEDVRVANLKPRISFNFFVTAPKNVSDIIPRTEVEKAIRMSRSRINDAFRLNDNSLEFLGIQPTLGDKTHTCPPCPAPELLGGPSVFLFPPKPKDTLMISRTPEVTCVVVDVSHEDPEVKFNWYVDGVEVHNAKTKPREEQYNSTYRVVSVLTVLHQDWLNGKEYKCKVSNKALPAPIEKTISKAKGQPREPQVYTLPPSRDELTKNQVSLTCLVKGFYPSDIAVEWESNGQPENNYKTTPPVLDSDGSFFLYSKLTVDKSRWQQGNVFSCSVMHEALHNHYTQKSLSLSPGVPLSRTVRCTCISISNQPVNPRSLEKLEIIPASQFCPRVEIIATMKKKGEKRCLNPESKAIKNLLKAVSKERSKRSP

SEQ ID NO: 125 - protein, 1028 aa, artificial
  ACE2 18-740 R273A with IgG4 wt and IP10
QSTIEEQAKTFLDKFNHEAEDLFYQSSLASWNYNTNITEENVQNMNNAGDKWSAFLKEQSTLAQMYPLQEIQNLTVKLQLQALQQNGSSVLSEDKSKRLNTILNTMSTIYSTGKVCNPDNPQECLLLEPGLNEIMANSLDYNERLWAWESWRSEVGKQLRPLYEEYVVLKNEMARANHYEDYGDYWRGDYEVNGVDGYDYSRGQLIEDVEHTFEEIKPLYEHLHAYVRAKLMNAYPSYISPIGCLPAHLLGDMWGAFWTNLYSLTVPFGQKPNIDVTDAMVDQAWDAQRIFKEAEKFFVSVGLPNMTQGFWENSMLTDPGNVQKAVCHPTAWDLGKGDFRILMCTKVTMDDFLTAHHEMGHIQYDMAYAAQPFLLRNGANEGFHEAVGEIMSLSAATPKHLKSIGLLSPDFQEDNETEINFLLKQALTIVGTLPFTYMLEKWRWMVFKGEIPKDQWMKKWWEMKREIVGVVEPVPHDETYCDPASLFHVSNDYSFIRYYTRTLYQFQFQEALCQAAKHEGPLHKCDISNSTEAGQKLFNMLRLGKSEPWTLALENVVGAKNMNVRPLLNYFEPLFTWLKDQNKNSFVGWSTDWSPYADQSIKVRISLKSALGDKAYEWNDNEMYLFRSSVAYAMRQYFLKVKNQMILFGEEDVRVANLKPRISFNFFVTAPKNVSDIIPRTEVEKAIRMSRSRINDAFRLNDNSLEFLGIQPTLGPPNQPPVSESKYGPPCPPCPAPEFLGGPSVFLFPPKPKDTLMISRTPEVTCVVVDVSQEDPEVQFNWYVDGVEVHNAKTKPREEQFNSTYRVVSVLTVLHQDWLNGKEYKCKVSNKGLPSSIEKTISKAKGQPREPQVYTLPPSQEEMTKNQVSLTCLVKGFYPSDIAVEWESNGQPENNYKTTPPVLDSDGSFFLYSRLTVDKSRWQEGNVFSCSVMHEALHNHYTQKSLSLSLGVPLSRTVRCTCISISNQPVNPRSLEKLEIIPASQFCPRVEIIATMKKKGEKRCLNPESKAIKNLLKAVSKERSKRSP

SEQ ID NO: 126 - protein, 1026 aa, artificial
  ACE2 18-740 R273A with IgG1 wt and IP10
QSTIEEQAKTFLDKFNHEAEDLFYQSSLASWNYNTNITEENVQNMNNAGDKWSAFLKEQSTLAQMYPLQEIQNLTVKLQLQALQQNGSSVLSEDKSKRLNTILNTMSTIYSTGKVCNPDNPQECLLLEPGLNEIMANSLDYNERLWAWESWRSEVGKQLRPLYEEYVVLKNEMARANHYEDYGDYWRGDYEVNGVDGYDYSRGQLIEDVEHTFEEIKPLYEHLHAYVRAKLMNAYPSYISPIGCLPAHLLGDMWGAFWTNLYSLTVPFGQKPNIDVTDAMVDQAWDAQRIFKEAEKFFVSVGLPNMTQGFWENSMLTDPGNVQKAVCHPTAWDLGKGDFRILMCTKVTMDDFLTAHHEMGHIQYDMAYAAQPFLLRNGANEGFHEAVGEIMSLSAATPKHLKSIGLLSPDFQEDNETEINFLLKQALTIVGTLPFTYMLEKWRWMVFKGEIPKDQWMKKWWEMKREIVGVVEPVPHDETYCDPASLFHVSNDYSFIRYYTRTLYQFQFQEALCQAAKHEGPLHKCDISNSTEAGQKLFNMLRLGKSEPWTLALENVVGAKNMNVRPLLNYFEPLFTWLKDQNKNSFVGWSTDWSPYADQSIKVRISLKSALGDKAYEWNDNEMYLFRSSVAYAMRQYFLKVKNQMILFGEEDVRVANLKPRISFNFFVTAPKNVSDIIPRTEVEKAIRMSRSRINDAFRLNDNSLEFLGIQPTLGPPNQPPVSDKTHTCPPCPAPELLGGPSVFLFPPKPKDTLMISRTPEVTCVVVDVSHEDPEVKFNWYVDGVEVHNAKTKPREEQYNSTYRVVSVLTVLHQDWLNGKEYKCKVSNKALPAPIEKTISKAKGQPREPQVYTLPPSRDELTKNQVSLTCLVKGFYPSDIAVEWESNGQPENNYKTTPPVLDSDGSFFLYSKLTVDKSRWQQGNVFSCSVMHEALHNHYTQKSLSLSPGVPLSRTVRCTCISISNQPVNPRSLEKLEIIPASQFCPRVEIIATMKKKGEKRCLNPESKAIKNLLKAVSKERSKRSP

SEQ ID NO: 127 - protein, 1020 aa, artificial
  ACE2 18-732 R273A with IgG4 YTE and IP10
QSTIEEQAKTFLDKFNHEAEDLFYQSSLASWNYNTNITEENVQNMNNAGDKWSAFLKEQSTLAQMYPLQEIQNLTVKLQLQALQQNGSSVLSEDKSKRLNTILNTMSTIYSTGKVCNPDNPQECLLLEPGLNEIMANSLDYNERLWAWESWRSEVGKQLRPLYEEYVVLKNEMARANHYEDYGDYWRGDYEVNGVDGYDYSRGQLIEDVEHTFEEIKPLYEHLHAYVRAKLMNAYPSYISPIGCLPAHLLGDMWGAFWTNLYSLTVPFGQKPNIDVTDAMVDQAWDAQRIFKEAEKFFVSVGLPNMTQGFWENSMLTDPGNVQKAVCHPTAWDLGKGDFRILMCTKVTMDDFLTAHHEMGHIQYDMAYAAQPFLLRNGANEGFHEAVGEIMSLSAATPKHLKSIGLLSPDFQEDNETEINFLLKQALTIVGTLPFTYMLEKWRWMVFKGEIPKDQWMKKWWEMKREIVGVVEPVPHDETYCDPASLFHVSNDYSFIRYYTRTLYQFQFQEALCQAAKHEGPLHKCDISNSTEAGQKLFNMLRLGKSEPWTLALENVVGAKNMNVRPLLNYFEPLFTWLKDQNKNSFVGWSTDWSPYADQSIKVRISLKSALGDKAYEWNDNEMYLFRSSVAYAMRQYFLKVKNQMILFGEEDVRVANLKPRISFNFFVTAPKNVSDIIPRTEVEKAIRMSRSRINDAFRLNDNSLEFLGIQPTLGESKYGPPCPPCPAPEFLGGPSVFLFPPKPKDTLYITREPEVTCVVVDVSQEDPEVQFNWYVDGVEVHNAKTKPREEQFNSTYRVVSVLTVLHQDWLNGKEYKCKVSNKGLPSSIEKTISKAKGQPREPQVYTLPPSQEEMTKNQVSLTCLVKGFYPSDIAVEWESNGQPENNYKTTPPVLDSDGSFFLYSRLTVDKSRWQEGNVFSCSVMHEALHNHYTQKSLSLSLGVPLSRTVRCTCISISNQPVNPRSLEKLEIIPASQFCPRVEIIATMKKKGEKRCLNPESKAIKNLLKAVSKERSKRSP

SEQ ID NO: 128 - protein, 1018 aa, artificial
  ACE2 18-732 R273A with IgG1 YTE and IP10
QSTIEEQAKTFLDKFNHEAEDLFYQSSLASWNYNTNITEENVQNMNNAGDKWSAFLKEQSTLAQMYPLQEIQNLTVKLQLQALQQNGSSVLSEDKSKRLNTILNTMSTIYSTGKVCNPDNPQECLLLEPGLNEIMANSLDYNERLWAWESWRSEVGKQLRPLYEEYVVLKNEMARANHYEDYGDYWRGDYEVNGVDGYDYSRGQLIEDVEHTFEEIKPLYEHLHAYVRAKLMNAYPSYISPIGCLPAHLLGDMWGAFWTNLYSLTVPFGQKPNIDVTDAMVDQAWDAQRIFKEAEKFFVSVGLPNMTQGFWENSMLTDPGNVQKAVCHPTAWDLGKGDFRILMCTKVTMDDFLTAHHEMGHIQYDMAYAAQPFLLRNGANEGFHEAVGEIMSLSAATPKHLKSIGLLSPDFQEDNETEINFLLKQALTIVGTLPFTYMLEKWRWMVFKGEIPKDQWMKKWWEMKREIVGVVEPVPHDETYCDPASLFHVSNDYSFIRYYTRTLYQFQFQEALCQAAKHEGPLHKCDISNSTEAGQKLFNMLRLGKSEPWTLALENVVGAKNMNVRPLLNYFEPLFTWLKDQNKNSFVGWSTDWSPYADQSIKVRISLKSALGDKAYEWNDNEMYLFRSSVAYAMRQYFLKVKNQMILFGEEDVRVANLKPRISFNFFVTAPKNVSDIIPRTEVEKAIRMSRSRINDAFRLNDNSLEFLGIQPTLGDKTHTCPPCPAPELLGGPSVFLFPPKPKDTLYITREPEVTCVVVDVSHEDPEVKFNWYVDGVEVHNAKTKPREEQYNSTYRVVSVLTVLHQDWLNGKEYKCKVSNKALPAPIEKTISKAKGQPREPQVYTLPPSRDELTKNQVSLTCLVKGFYPSDIAVEWESNGQPENNYKTTPPVLDSDGSFFLYSKLTVDKSRWQQGNVFSCSVMHEALHNHYTQKSLSLSPGVPLSRTVRCTCISISNQPVNPRSLEKLEIIPASQFCPRVEIIATMKKKGEKRCLNPESKAIKNLLKAVSKERSKRSP

SEQ ID NO: 129 - protein, 1028 aa, artificial
  ACE2 18-740 R273A with IgG4 YTE and IP10
QSTIEEQAKTFLDKFNHEAEDLFYQSSLASWNYNTNITEENVQNMNNAGDKWSAFLKEQSTLAQMYPLQEIQNLTVKLQLQALQQNGSSVLSEDKSKRLNTILNTMSTIYSTGKVCNPDNPQECLLLEPGLNEIMANSLDYNERLWAWESWRSEVGKQLRPLYEEYVVLKNEMARANHYEDYGDYWRGDYEVNGVDGYDYSRGQLIEDVEHTFEEIKPLYEHLHAYVRAKLMNAYPSYISPIGCLPAHLLGDMWGAFWTNLYSLTVPFGQKPNIDVTDAMVDQAWDAQRIFKEAEKFFVSVGLPNMTQGFWENSMLTDPGNVQKAVCHPTAWDLGKGDFRILMCTKVTMDDFLTAHHEMGHIQYDMAYAAQPFLLRNGANEGFHEAVGEIMSLSAATPKHLKSIGLLSPDFQEDNETEINFLLKQALTIVGTLPFTYMLEKWRWMVFKGEIPKDQWMKKWWEMKREIVGVVEPVPHDETYCDPASLFHVSNDYSFIRYYTRTLYQFQFQEALCQAAKHEGPLHKCDISNSTEAGQKLFNMLRLGKSEPWTLALENVVGAKNMNVRPLLNYFEPLFTWLKDQNKNSFVGWSTDWSPYADQSIKVRISLKSALGDKAYEWNDNEMYLFRSSVAYAMRQYFLKVKNQMILFGEEDVRVANLKPRISFNFFVTAPKNVSDIIPRTEVEKAIRMSRSRINDAFRLNDNSLEFLGIQPTLGPPNQPPVSESKYGPPCPPCPAPEFLGGPSVFLFPPKPKDTLYITREPEVTCVVVDVSQEDPEVQFNWYVDGVEVHNAKTKPREEQFNSTYRVVSVLTVLHQDWLNGKEYKCKVSNKGLPSSIEKTISKAKGQPREPQVYTLPPSQEEMTKNQVSLTCLVKGFYPSDIAVEWESNGQPENNYKTTPPVLDSDGSFFLYSRLTVDKSRWQEGNVFSCSVMHEALHNHYTQKSLSLSLGVPLSRTVRCTCISISNQPVNPRSLEKLEIIPASQFCPRVEIIATMKKKGEKRCLNPESKAIKNLLKAVSKERSKRSP

SEQ ID NO: 130 - protein, 1026 aa, artificial
  ACE2 18-740 R273A witth IgG1 YTE and IP10
QSTIEEQAKTFLDKFNHEAEDLFYQSSLASWNYNTNITEENVQNMNNAGDKWSAFLKEQSTLAQMYPLQEIQNLTVKLQLQALQQNGSSVLSEDKSKRLNTILNTMSTIYSTGKVCNPDNPQECLLLEPGLNEIMANSLDYNERLWAWESWRSEVGKQLRPLYEEYVVLKNEMARANHYEDYGDYWRGDYEVNGVDGYDYSRGQLIEDVEHTFEEIKPLYEHLHAYVRAKLMNAYPSYISPIGCLPAHLLGDMWGAFWTNLYSLTVPFGQKPNIDVTDAMVDQAWDAQRIFKEAEKFFVSVGLPNMTQGFWENSMLTDPGNVQKAVCHPTAWDLGKGDFRILMCTKVTMDDFLTAHHEMGHIQYDMAYAAQPFLLRNGANEGFHEAVGEIMSLSAATPKHLKSIGLLSPDFQEDNETEINFLLKQALTIVGTLPFTYMLEKWRWMVFKGEIPKDQWMKKWWEMKREIVGVVEPVPHDETYCDPASLFHVSNDYSFIRYYTRTLYQFQFQEALCQAAKHEGPLHKCDISNSTEAGQKLFNMLRLGKSEPWTLALENVVGAKNMNVRPLLNYFEPLFTWLKDQNKNSFVGWSTDWSPYADQSIKVRISLKSALGDKAYEWNDNEMYLFRSSVAYAMRQYFLKVKNQMILFGEEDVRVANLKPRISFNFFVTAPKNVSDIIPRTEVEKAIRMSRSRINDAFRLNDNSLEFLGIQPTLGPPNQPPVSDKTHTCPPCPAPELLGGPSVFLFPPKPKDTLYITREPEVTCVVVDVSHEDPEVKFNWYVDGVEVHNAKTKPREEQYNSTYRVVSVLTVLHQDWLNGKEYKCKVSNKALPAPIEKTISKAKGQPREPQVYTLPPSRDELTKNQVSLTCLVKGFYPSDIAVEWESNGQPENNYKTTPPVLDSDGSFFLYSKLTVDKSRWQQGNVFSCSVMHEALHNHYTQKSLSLSPGVPLSRTVRCTCISISNQPVNPRSLEKLEIIPASQFCPRVEIIATMKKKGEKRCLNPESKAIKNLLKAVSKERSKRSP

SEQ ID NO: 131 - protein, 1020 aa, artificial
  ACE2 18-732 R273A with IgG4 T256D T307Q and IP10
QSTIEEQAKTFLDKFNHEAEDLFYQSSLASWNYNTNITEENVQNMNNAGDKWSAFLKEQSTLAQMYPLQEIQNLTVKLQLQALQQNGSSVLSEDKSKRLNTILNTMSTIYSTGKVCNPDNPQECLLLEPGLNEIMANSLDYNERLWAWESWRSEVGKQLRPLYEEYVVLKNEMARANHYEDYGDYWRGDYEVNGVDGYDYSRGQLIEDVEHTFEEIKPLYEHLHAYVRAKLMNAYPSYISPIGCLPAHLLGDMWGAFWTNLYSLTVPFGQKPNIDVTDAMVDQAWDAQRIFKEAEKFFVSVGLPNMTQGFWENSMLTDPGNVQKAVCHPTAWDLGKGDFRILMCTKVTMDDFLTAHHEMGHIQYDMAYAAQPFLLRNGANEGFHEAVGEIMSLSAATPKHLKSIGLLSPDFQEDNETEINFLLKQALTIVGTLPFTYMLEKWRWMVFKGEIPKDQWMKKWWEMKREIVGVVEPVPHDETYCDPASLFHVSNDYSFIRYYTRTLYQFQFQEALCQAAKHEGPLHKCDISNSTEAGQKLFNMLRLGKSEPWTLALENVVGAKNMNVRPLLNYFEPLFTWLKDQNKNSFVGWSTDWSPYADQSIKVRISLKSALGDKAYEWNDNEMYLFRSSVAYAMRQYFLKVKNQMILFGEEDVRVANLKPRISFNFFVTAPKNVSDIIPRTEVEKAIRMSRSRINDAFRLNDNSLEFLGIQPTLGESKYGPPCPPCPAPEFLGGPSVFLFPPKPKDTLMISRDPEVTCVVVDVSQEDPEVQFNWYVDGVEVHNAKTKPREEQFNSTYRVVSVLQVLHQDWLNGKEYKCKVSNKGLPSSIEKTISKAKGQPREPQVYTLPPSQEEMTKNQVSLTCLVKGFYPSDIAVEWESNGQPENNYKTTPPVLDSDGSFFLYSRLTVDKSRWQEGNVFSCSVMHEALHNHYTQKSLSLSLGVPLSRTVRCTCISISNQPVNPRSLEKLEIIPASQFCPRVEIIATMKKKGEKRCLNPESKAIKNLLKAVSKERSKRSP

SEQ ID NO: 132 - protein, 1018 aa, artificial
  ACE2 18-732 R273A with IgG1 T256D T307Q and IP10
QSTIEEQAKTFLDKFNHEAEDLFYQSSLASWNYNTNITEENVQNMNNAGDKWSAFLKEQSTLAQMYPLQEIQNLTVKLQLQALQQNGSSVLSEDKSKRLNTILNTMSTIYSTGKVCNPDNPQECLLLEPGLNEIMANSLDYNERLWAWESWRSEVGKQLRPLYEEYVVLKNEMARANHYEDYGDYWRGDYEVNGVDGYDYSRGQLIEDVEHTFEEIKPLYEHLHAYVRAKLMNAYPSYISPIGCLPAHLLGDMWGAFWTNLYSLTVPFGQKPNIDVTDAMVDQAWDAQRIFKEAEKFFVSVGLPNMTQGFWENSMLTDPGNVQKAVCHPTAWDLGKGDFRILMCTKVTMDDFLTAHHEMGHIQYDMAYAAQPFLLRNGANEGFHEAVGEIMSLSAATPKHLKSIGLLSPDFQEDNETEINFLLKQALTIVGTLPFTYMLEKWRWMVFKGEIPKDQWMKKWWEMKREIVGVVEPVPHDETYCDPASLFHVSNDYSFIRYYTRTLYQFQFQEALCQAAKHEGPLHKCDISNSTEAGQKLFNMLRLGKSEPWTLALENVVGAKNMNVRPLLNYFEPLFTWLKDQNKNSFVGWSTDWSPYADQSIKVRISLKSALGDKAYEWNDNEMYLFRSSVAYAMRQYFLKVKNQMILFGEEDVRVANLKPRISFNFFVTAPKNVSDIIPRTEVEKAIRMSRSRINDAFRLNDNSLEFLGIQPTLGDKTHTCPPCPAPELLGGPSVFLFPPKPKDTLMISRDPEVTCVVVDVSHEDPEVKFNWYVDGVEVHNAKTKPREEQYNSTYRVVSVLQVLHQDWLNGKEYKCKVSNKALPAPIEKTISKAKGQPREPQVYTLPPSRDELTKNQVSLTCLVKGFYPSDIAVEWESNGQPENNYKTTPPVLDSDGSFFLYSKLTVDKSRWQQGNVFSCSVMHEALHNHYTQKSLSLSPGVPLSRTVRCTCISISNQPVNPRSLEKLEIIPASQFCPRVEIIATMKKKGEKRCLNPESKAIKNLLKAVSKERSKRSP

SEQ ID NO: 133 - protein, 1028 aa, artificial
  ACE2 18-740 R273A with IgG4 T256D T307Q and IP10
QSTIEEQAKTFLDKFNHEAEDLFYQSSLASWNYNTNITEENVQNMNNAGDKWSAFLKEQSTLAQMYPLQEIQNLTVKLQLQALQQNGSSVLSEDKSKRLNTILNTMSTIYSTGKVCNPDNPQECLLLEPGLNEIMANSLDYNERLWAWESWRSEVGKQLRPLYEEYVVLKNEMARANHYEDYGDYWRGDYEVNGVDGYDYSRGQLIEDVEHTFEEIKPLYEHLHAYVRAKLMNAYPSYISPIGCLPAHLLGDMWGAFWTNLYSLTVPFGQKPNIDVTDAMVDQAWDAQRIFKEAEKFFVSVGLPNMTQGFWENSMLTDPGNVQKAVCHPTAWDLGKGDFRILMCTKVTMDDFLTAHHEMGHIQYDMAYAAQPFLLRNGANEGFHEAVGEIMSLSAATPKHLKSIGLLSPDFQEDNETEINFLLKQALTIVGTLPFTYMLEKWRWMVFKGEIPKDQWMKKWWEMKREIVGVVEPVPHDETYCDPASLFHVSNDYSFIRYYTRTLYQFQFQEALCQAAKHEGPLHKCDISNSTEAGQKLFNMLRLGKSEPWTLALENVVGAKNMNVRPLLNYFEPLFTWLKDQNKNSFVGWSTDWSPYADQSIKVRISLKSALGDKAYEWNDNEMYLFRSSVAYAMRQYFLKVKNQMILFGEEDVRVANLKPRISFNFFVTAPKNVSDIIPRTEVEKAIRMSRSRINDAFRLNDNSLEFLGIQPTLGPPNQPPVSESKYGPPCPPCPAPEFLGGPSVFLFPPKPKDTLMISRDPEVTCVVVDVSQEDPEVQFNWYVDGVEVHNAKTKPREEQFNSTYRVVSVLQVLHQDWLNGKEYKCKVSNKGLPSSIEKTISKAKGQPREPQVYTLPPSQEEMTKNQVSLTCLVKGFYPSDIAVEWESNGQPENNYKTTPPVLDSDGSFFLYSRLTVDKSRWQEGNVFSCSVMHEALHNHYTQKSLSLSLGVPLSRTVRCTCISISNQPVNPRSLEKLEIIPASQFCPRVEIIATMKKKGEKRCLNPESKAIKNLLKAVSKERSKRSP

SEQ ID NO: 134 - protein, 1026 aa, artificial
  ACE2 18-740 R273A with IgG1 T256D T307Q and IP10
QSTIEEQAKTFLDKFNHEAEDLFYQSSLASWNYNTNITEENVQNMNNAGDKWSAFLKEQSTLAQMYPLQEIQNLTVKLQLQALQQNGSSVLSEDKSKRLNTILNTMSTIYSTGKVCNPDNPQECLLLEPGLNEIMANSLDYNERLWAWESWRSEVGKQLRPLYEEYVVLKNEMARANHYEDYGDYWRGDYEVNGVDGYDYSRGQLIEDVEHTFEEIKPLYEHLHAYVRAKLMNAYPSYISPIGCLPAHLLGDMWGAFWTNLYSLTVPFGQKPNIDVTDAMVDQAWDAQRIFKEAEKFFVSVGLPNMTQGFWENSMLTDPGNVQKAVCHPTAWDLGKGDFRILMCTKVTMDDFLTAHHEMGHIQYDMAYAAQPFLLRNGANEGFHEAVGEIMSLSAATPKHLKSIGLLSPDFQEDNETEINFLLKQALTIVGTLPFTYMLEKWRWMVFKGEIPKDQWMKKWWEMKREIVGVVEPVPHDETYCDPASLFHVSNDYSFIRYYTRTLYQFQFQEALCQAAKHEGPLHKCDISNSTEAGQKLFNMLRLGKSEPWTLALENVVGAKNMNVRPLLNYFEPLFTWLKDQNKNSFVGWSTDWSPYADQSIKVRISLKSALGDKAYEWNDNEMYLFRSSVAYAMRQYFLKVKNQMILFGEEDVRVANLKPRISFNFFVTAPKNVSDIIPRTEVEKAIRMSRSRINDAFRLNDNSLEFLGIQPTLGPPNQPPVSDKTHTCPPCPAPELLGGPSVFLFPPKPKDTLMISRDPEVTCVVVDVSHEDPEVKFNWYVDGVEVHNAKTKPREEQYNSTYRVVSVLQVLHQDWLNGKEYKCKVSNKALPAPIEKTISKAKGQPREPQVYTLPPSRDELTKNQVSLTCLVKGFYPSDIAVEWESNGQPENNYKTTPPVLDSDGSFFLYSKLTVDKSRWQQGNVFSCSVMHEALHNHYTQKSLSLSPGVPLSRTVRCTCISISNQPVNPRSLEKLEIIPASQFCPRVEIIATMKKKGEKRCLNPESKAIKNLLKAVSKERSKRSP

SEQ ID NO: 135 - protein, 1020 aa, artificial
  ACE2 18-732 S645C with IgG4 wt and IP10
QSTIEEQAKTFLDKFNHEAEDLFYQSSLASWNYNTNITEENVQNMNNAGDKWSAFLKEQSTLAQMYPLQEIQNLTVKLQLQALQQNGSSVLSEDKSKRLNTILNTMSTIYSTGKVCNPDNPQECLLLEPGLNEIMANSLDYNERLWAWESWRSEVGKQLRPLYEEYVVLKNEMARANHYEDYGDYWRGDYEVNGVDGYDYSRGQLIEDVEHTFEEIKPLYEHLHAYVRAKLMNAYPSYISPIGCLPAHLLGDMWGRFWTNLYSLTVPFGQKPNIDVTDAMVDQAWDAQRIFKEAEKFFVSVGLPNMTQGFWENSMLTDPGNVQKAVCHPTAWDLGKGDFRILMCTKVTMDDFLTAHHEMGHIQYDMAYAAQPFLLRNGANEGFHEAVGEIMSLSAATPKHLKSIGLLSPDFQEDNETEINFLLKQALTIVGTLPFTYMLEKWRWMVFKGEIPKDQWMKKWWEMKREIVGVVEPVPHDETYCDPASLFHVSNDYSFIRYYTRTLYQFQFQEALCQAAKHEGPLHKCDISNSTEAGQKLFNMLRLGKSEPWTLALENVVGAKNMNVRPLLNYFEPLFTWLKDQNKNSFVGWSTDWSPYADQSIKVRISLKSALGDKAYEWNDNEMYLFRCSVAYAMRQYFLKVKNQMILFGEEDVRVANLKPRISFNFFVTAPKNVSDIIPRTEVEKAIRMSRSRINDAFRLNDNSLEFLGIQPTLGESKYGPPCPPCPAPEFLGGPSVFLFPPKPKDTLMISRTPEVTCVVVDVSQEDPEVQFNWYVDGVEVHNAKTKPREEQFNSTYRVVSVLTVLHQDWLNGKEYKCKVSNKGLPSSIEKTISKAKGQPREPQVYTLPPSQEEMTKNQVSLTCLVKGFYPSDIAVEWESNGQPENNYKTTPPVLDSDGSFFLYSRLTVDKSRWQEGNVFSCSVMHEALHNHYTQKSLSLSLGVPLSRTVRCTCISISNQPVNPRSLEKLEIIPASQFCPRVEIIATMKKKGEKRCLNPESKAIKNLLKAVSKERSKRSP

SEQ ID NO: 136 - protein, 1018 aa, artificial
  ACE2 18-732 S645C with IgG1 wt and IP10
QSTIEEQAKTFLDKFNHEAEDLFYQSSLASWNYNTNITEENVQNMNNAGDKWSAFLKEQSTLAQMYPLQEIQNLTVKLQLQALQQNGSSVLSEDKSKRLNTILNTMSTIYSTGKVCNPDNPQECLLLEPGLNEIMANSLDYNERLWAWESWRSEVGKQLRPLYEEYVVLKNEMARANHYEDYGDYWRGDYEVNGVDGYDYSRGQLIEDVEHTFEEIKPLYEHLHAYVRAKLMNAYPSYISPIGCLPAHLLGDMWGRFWTNLYSLTVPFGQKPNIDVTDAMVDQAWDAQRIFKEAEKFFVSVGLPNMTQGFWENSMLTDPGNVQKAVCHPTAWDLGKGDFRILMCTKVTMDDFLTAHHEMGHIQYDMAYAAQPFLLRNGANEGFHEAVGEIMSLSAATPKHLKSIGLLSPDFQEDNETEINFLLKQALTIVGTLPFTYMLEKWRWMVFKGEIPKDQWMKKWWEMKREIVGVVEPVPHDETYCDPASLFHVSNDYSFIRYYTRTLYQFQFQEALCQAAKHEGPLHKCDISNSTEAGQKLFNMLRLGKSEPWTLALENVVGAKNMNVRPLLNYFEPLFTWLKDQNKNSFVGWSTDWSPYADQSIKVRISLKSALGDKAYEWNDNEMYLFRCSVAYAMRQYFLKVKNQMILFGEEDVRVANLKPRISFNFFVTAPKNVSDIIPRTEVEKAIRMSRSRINDAFRLNDNSLEFLGIQPTLGDKTHTCPPCPAPELLGGPSVFLFPPKPKDTLMISRTPEVTCVVVDVSHEDPEVKFNWYVDGVEVHNAKTKPREEQYNSTYRVVSVLTVLHQDWLNGKEYKCKVSNKALPAPIEKTISKAKGQPREPQVYTLPPSRDELTKNQVSLTCLVKGFYPSDIAVEWESNGQPENNYKTTPPVLDSDGSFFLYSKLTVDKSRWQQGNVFSCSVMHEALHNHYTQKSLSLSPGVPLSRTVRCTCISISNQPVNPRSLEKLEIIPASQFCPRVEIIATMKKKGEKRCLNPESKAIKNLLKAVSKERSKRSP

SEQ ID NO: 137 - protein, 1028 aa, artificial
  ACE2 18-740 S645C with IgG1 wt and IP10
QSTIEEQAKTFLDKFNHEAEDLFYQSSLASWNYNTNITEENVQNMNNAGDKWSAFLKEQSTLAQMYPLQEIQNLTVKLQLQALQQNGSSVLSEDKSKRLNTILNTMSTIYSTGKVCNPDNPQECLLLEPGLNEIMANSLDYNERLWAWESWRSEVGKQLRPLYEEYVVLKNEMARANHYEDYGDYWRGDYEVNGVDGYDYSRGQLIEDVEHTFEEIKPLYEHLHAYVRAKLMNAYPSYISPIGCLPAHLLGDMWGRFWTNLYSLTVPFGQKPNIDVTDAMVDQAWDAQRIFKEAEKFFVSVGLPNMTQGFWENSMLTDPGNVQKAVCHPTAWDLGKGDFRILMCTKVTMDDFLTAHHEMGHIQYDMAYAAQPFLLRNGANEGFHEAVGEIMSLSAATPKHLKSIGLLSPDFQEDNETEINFLLKQALTIVGTLPFTYMLEKWRWMVFKGEIPKDQWMKKWWEMKREIVGVVEPVPHDETYCDPASLFHVSNDYSFIRYYTRTLYQFQFQEALCQAAKHEGPLHKCDISNSTEAGQKLFNMLRLGKSEPWTLALENVVGAKNMNVRPLLNYFEPLFTWLKDQNKNSFVGWSTDWSPYADQSIKVRISLKSALGDKAYEWNDNEMYLFRCSVAYAMRQYFLKVKNQMILFGEEDVRVANLKPRISFNFFVTAPKNVSDIIPRTEVEKAIRMSRSRINDAFRLNDNSLEFLGIQPTLGPPNQPPVSESKYGPPCPPCPAPEFLGGPSVFLFPPKPKDTLMISRTPEVTCVVVDVSQEDPEVQFNWYVDGVEVHNAKTKPREEQFNSTYRVVSVLTVLHQDWLNGKEYKCKVSNKGLPSSIEKTISKAKGQPREPQVYTLPPSQEEMTKNQVSLTCLVKGFYPSDIAVEWESNGQPENNYKTTPPVLDSDGSFFLYSRLTVDKSRWQEGNVFSCSVMHEALHNHYTQKSLSLSLGVPLSRTVRCTCISISNQPVNPRSLEKLEIIPASQFCPRVEIIATMKKKGEKRCLNPESKAIKNLLKAVSKERSKRSP

SEQ ID NO: 138 - protein, 1026 aa, artificial
  ACE2 18-740 S645C with IgG1 wt and IP10
QSTIEEQAKTFLDKFNHEAEDLFYQSSLASWNYNTNITEENVQNMNNAGDKWSAFLKEQSTLAQMYPLQEIQNLTVKLQLQALQQNGSSVLSEDKSKRLNTILNTMSTIYSTGKVCNPDNPQECLLLEPGLNEIMANSLDYNERLWAWESWRSEVGKQLRPLYEEYVVLKNEMARANHYEDYGDYWRGDYEVNGVDGYDYSRGQLIEDVEHTFEEIKPLYEHLHAYVRAKLMNAYPSYISPIGCLPAHLLGDMWGRFWTNLYSLTVPFGQKPNIDVTDAMVDQAWDAQRIFKEAEKFFVSVGLPNMTQGFWENSMLTDPGNVQKAVCHPTAWDLGKGDFRILMCTKVTMDDFLTAHHEMGHIQYDMAYAAQPFLLRNGANEGFHEAVGEIMSLSAATPKHLKSIGLLSPDFQEDNETEINFLLKQALTIVGTLPFTYMLEKWRWMVFKGEIPKDQWMKKWWEMKREIVGVVEPVPHDETYCDPASLFHVSNDYSFIRYYTRTLYQFQFQEALCQAAKHEGPLHKCDISNSTEAGQKLFNMLRLGKSEPWTLALENVVGAKNMNVRPLLNYFEPLFTWLKDQNKNSFVGWSTDWSPYADQSIKVRISLKSALGDKAYEWNDNEMYLFRCSVAYAMRQYFLKVKNQMILFGEEDVRVANLKPRISFNFFVTAPKNVSDIIPRTEVEKAIRMSRSRINDAFRLNDNSLEFLGIQPTLGPPNQPPVSDKTHTCPPCPAPELLGGPSVFLFPPKPKDTLMISRTPEVTCVVVDVSHEDPEVKFNWYVDGVEVHNAKTKPREEQYNSTYRVVSVLTVLHQDWLNGKEYKCKVSNKALPAPIEKTISKAKGQPREPQVYTLPPSRDELTKNQVSLTCLVKGFYPSDIAVEWESNGQPENNYKTTPPVLDSDGSFFLYSKLTVDKSRWQQGNVFSCSVMHEALHNHYTQKSLSLSPGVPLSRTVRCTCISISNQPVNPRSLEKLEIIPASQFCPRVEIIATMKKKGEKRCLNPESKAIKNLLKAVSKERSKRSP

SEQ ID NO: 139 - protein, 1020 aa, artificial
  ACE2 18-732 S645C with IgG4 YTE and IP10
QSTIEEQAKTFLDKFNHEAEDLFYQSSLASWNYNTNITEENVQNMNNAGDKWSAFLKEQSTLAQMYPLQEIQNLTVKLQLQALQQNGSSVLSEDKSKRLNTILNTMSTIYSTGKVCNPDNPQECLLLEPGLNEIMANSLDYNERLWAWESWRSEVGKQLRPLYEEYVVLKNEMARANHYEDYGDYWRGDYEVNGVDGYDYSRGQLIEDVEHTFEEIKPLYEHLHAYVRAKLMNAYPSYISPIGCLPAHLLGDMWGRFWTNLYSLTVPFGQKPNIDVTDAMVDQAWDAQRIFKEAEKFFVSVGLPNMTQGFWENSMLTDPGNVQKAVCHPTAWDLGKGDFRILMCTKVTMDDFLTAHHEMGHIQYDMAYAAQPFLLRNGANEGFHEAVGEIMSLSAATPKHLKSIGLLSPDFQEDNETEINFLLKQALTIVGTLPFTYMLEKWRWMVFKGEIPKDQWMKKWWEMKREIVGVVEPVPHDETYCDPASLFHVSNDYSFIRYYTRTLYQFQFQEALCQAAKHEGPLHKCDISNSTEAGQKLFNMLRLGKSEPWTLALENVVGAKNMNVRPLLNYFEPLFTWLKDQNKNSFVGWSTDWSPYADQSIKVRISLKSALGDKAYEWNDNEMYLFRCSVAYAMRQYFLKVKNQMILFGEEDVRVANLKPRISFNFFVTAPKNVSDIIPRTEVEKAIRMSRSRINDAFRLNDNSLEFLGIQPTLGESKYGPPCPPCPAPEFLGGPSVFLFPPKPKDTLYITREPEVTCVVVDVSQEDPEVQFNWYVDGVEVHNAKTKPREEQFNSTYRVVSVLTVLHQDWLNGKEYKCKVSNKGLPSSIEKTISKAKGQPREPQVYTLPPSQEEMTKNQVSLTCLVKGFYPSDIAVEWESNGQPENNYKTTPPVLDSDGSFFLYSRLTVDKSRWQEGNVFSCSVMHEALHNHYTQKSLSLSLGVPLSRTVRCTCISISNQPVNPRSLEKLEIIPASQFCPRVEIIATMKKKGEKRCLNPESKAIKNLLKAVSKERSKRSP

SEQ ID NO: 140 - protein, 1018 aa, artificial
  ACE2 18-732 S645C with IgG1 YTE and IP10
QSTIEEQAKTFLDKFNHEAEDLFYQSSLASWNYNTNITEENVQNMNNAGDKWSAFLKEQSTLAQMYPLQEIQNLTVKLQLQALQQNGSSVLSEDKSKRLNTILNTMSTIYSTGKVCNPDNPQECLLLEPGLNEIMANSLDYNERLWAWESWRSEVGKQLRPLYEEYVVLKNEMARANHYEDYGDYWRGDYEVNGVDGYDYSRGQLIEDVEHTFEEIKPLYEHLHAYVRAKLMNAYPSYISPIGCLPAHLLGDMWGRFWTNLYSLTVPFGQKPNIDVTDAMVDQAWDAQRIFKEAEKFFVSVGLPNMTQGFWENSMLTDPGNVQKAVCHPTAWDLGKGDFRILMCTKVTMDDFLTAHHEMGHIQYDMAYAAQPFLLRNGANEGFHEAVGEIMSLSAATPKHLKSIGLLSPDFQEDNETEINFLLKQALTIVGTLPFTYMLEKWRWMVFKGEIPKDQWMKKWWEMKREIVGVVEPVPHDETYCDPASLFHVSNDYSFIRYYTRTLYQFQFQEALCQAAKHEGPLHKCDISNSTEAGQKLFNMLRLGKSEPWTLALENVVGAKNMNVRPLLNYFEPLFTWLKDQNKNSFVGWSTDWSPYADQSIKVRISLKSALGDKAYEWNDNEMYLFRCSVAYAMRQYFLKVKNQMILFGEEDVRVANLKPRISFNFFVTAPKNVSDIIPRTEVEKAIRMSRSRINDAFRLNDNSLEFLGIQPTLGDKTHTCPPCPAPELLGGPSVFLFPPKPKDTLYITREPEVTCVVVDVSHEDPEVKFNWYVDGVEVHNAKTKPREEQYNSTYRVVSVLTVLHQDWLNGKEYKCKVSNKALPAPIEKTISKAKGQPREPQVYTLPPSRDELTKNQVSLTCLVKGFYPSDIAVEWESNGQPENNYKTTPPVLDSDGSFFLYSKLTVDKSRWQQGNVFSCSVMHEALHNHYTQKSLSLSPGVPLSRTVRCTCISISNQPVNPRSLEKLEIIPASQFCPRVEIIATMKKKGEKRCLNPESKAIKNLLKAVSKERSKRSP

SEQ ID NO: 141 - protein, 1028 aa, artificial
  ACE2 18-740 S645C with IgG4 YTE and IP10
QSTIEEQAKTFLDKFNHEAEDLFYQSSLASWNYNTNITEENVQNMNNAGDKWSAFLKEQSTLAQMYPLQEIQNLTVKLQLQALQQNGSSVLSEDKSKRLNTILNTMSTIYSTGKVCNPDNPQECLLLEPGLNEIMANSLDYNERLWAWESWRSEVGKQLRPLYEEYVVLKNEMARANHYEDYGDYWRGDYEVNGVDGYDYSRGQLIEDVEHTFEEIKPLYEHLHAYVRAKLMNAYPSYISPIGCLPAHLLGDMWGRFWTNLYSLTVPFGQKPNIDVTDAMVDQAWDAQRIFKEAEKFFVSVGLPNMTQGFWENSMLTDPGNVQKAVCHPTAWDLGKGDFRILMCTKVTMDDFLTAHHEMGHIQYDMAYAAQPFLLRNGANEGFHEAVGEIMSLSAATPKHLKSIGLLSPDFQEDNETEINFLLKQALTIVGTLPFTYMLEKWRWMVFKGEIPKDQWMKKWWEMKREIVGVVEPVPHDETYCDPASLFHVSNDYSFIRYYTRTLYQFQFQEALCQAAKHEGPLHKCDISNSTEAGQKLFNMLRLGKSEPWTLALENVVGAKNMNVRPLLNYFEPLFTWLKDQNKNSFVGWSTDWSPYADQSIKVRISLKSALGDKAYEWNDNEMYLFRCSVAYAMRQYFLKVKNQMILFGEEDVRVANLKPRISFNFFVTAPKNVSDIIPRTEVEKAIRMSRSRINDAFRLNDNSLEFLGIQPTLGPPNQPPVSESKYGPPCPPCPAPEFLGGPSVFLFPPKPKDTLYITREPEVTCVVVDVSQEDPEVQFNWYVDGVEVHNAKTKPREEQFNSTYRVVSVLTVLHQDWLNGKEYKCKVSNKGLPSSIEKTISKAKGQPREPQVYTLPPSQEEMTKNQVSLTCLVKGFYPSDIAVEWESNGQPENNYKTTPPVLDSDGSFFLYSRLTVDKSRWQEGNVFSCSVMHEALHNHYTQKSLSLSLGVPLSRTVRCTCISISNQPVNPRSLEKLEIIPASQFCPRVEIIATMKKKGEKRCLNPESKAIKNLLKAVSKERSKRSP

SEQ ID NO: 142 - protein, 1026 aa, artificial
  ACE2 18-740 S645C with IgG1 YTE and IP10
QSTIEEQAKTFLDKFNHEAEDLFYQSSLASWNYNTNITEENVQNMNNAGDKWSAFLKEQSTLAQMYPLQEIQNLTVKLQLQALQQNGSSVLSEDKSKRLNTILNTMSTIYSTGKVCNPDNPQECLLLEPGLNEIMANSLDYNERLWAWESWRSEVGKQLRPLYEEYVVLKNEMARANHYEDYGDYWRGDYEVNGVDGYDYSRGQLIEDVEHTFEEIKPLYEHLHAYVRAKLMNAYPSYISPIGCLPAHLLGDMWGRFWTNLYSLTVPFGQKPNIDVTDAMVDQAWDAQRIFKEAEKFFVSVGLPNMTQGFWENSMLTDPGNVQKAVCHPTAWDLGKGDFRILMCTKVTMDDFLTAHHEMGHIQYDMAYAAQPFLLRNGANEGFHEAVGEIMSLSAATPKHLKSIGLLSPDFQEDNETEINFLLKQALTIVGTLPFTYMLEKWRWMVFKGEIPKDQWMKKWWEMKREIVGVVEPVPHDETYCDPASLFHVSNDYSFIRYYTRTLYQFQFQEALCQAAKHEGPLHKCDISNSTEAGQKLFNMLRLGKSEPWTLALENVVGAKNMNVRPLLNYFEPLFTWLKDQNKNSFVGWSTDWSPYADQSIKVRISLKSALGDKAYEWNDNEMYLFRCSVAYAMRQYFLKVKNQMILFGEEDVRVANLKPRISFNFFVTAPKNVSDIIPRTEVEKAIRMSRSRINDAFRLNDNSLEFLGIQPTLGPPNQPPVSDKTHTCPPCPAPELLGGPSVFLFPPKPKDTLYITREPEVTCVVVDVSHEDPEVKFNWYVDGVEVHNAKTKPREEQYNSTYRVVSVLTVLHQDWLNGKEYKCKVSNKALPAPIEKTISKAKGQPREPQVYTLPPSRDELTKNQVSLTCLVKGFYPSDIAVEWESNGQPENNYKTTPPVLDSDGSFFLYSKLTVDKSRWQQGNVFSCSVMHEALHNHYTQKSLSLSPGVPLSRTVRCTCISISNQPVNPRSLEKLEIIPASQFCPRVEIIATMKKKGEKRCLNPESKAIKNLLKAVSKERSKRSP

SEQ ID NO: 143 - protein, 1020 aa, artificial
  ACE2 18-732 S645C with IgG4 T256D T307Q and IP10
QSTIEEQAKTFLDKFNHEAEDLFYQSSLASWNYNTNITEENVQNMNNAGDKWSAFLKEQSTLAQMYPLQEIQNLTVKLQLQALQQNGSSVLSEDKSKRLNTILNTMSTIYSTGKVCNPDNPQECLLLEPGLNEIMANSLDYNERLWAWESWRSEVGKQLRPLYEEYVVLKNEMARANHYEDYGDYWRGDYEVNGVDGYDYSRGQLIEDVEHTFEEIKPLYEHLHAYVRAKLMNAYPSYISPIGCLPAHLLGDMWGRFWTNLYSLTVPFGQKPNIDVTDAMVDQAWDAQRIFKEAEKFFVSVGLPNMTQGFWENSMLTDPGNVQKAVCHPTAWDLGKGDFRILMCTKVTMDDFLTAHHEMGHIQYDMAYAAQPFLLRNGANEGFHEAVGEIMSLSAATPKHLKSIGLLSPDFQEDNETEINFLLKQALTIVGTLPFTYMLEKWRWMVFKGEIPKDQWMKKWWEMKREIVGVVEPVPHDETYCDPASLFHVSNDYSFIRYYTRTLYQFQFQEALCQAAKHEGPLHKCDISNSTEAGQKLFNMLRLGKSEPWTLALENVVGAKNMNVRPLLNYFEPLFTWLKDQNKNSFVGWSTDWSPYADQSIKVRISLKSALGDKAYEWNDNEMYLFRCSVAYAMRQYFLKVKNQMILFGEEDVRVANLKPRISFNFFVTAPKNVSDIIPRTEVEKAIRMSRSRINDAFRLNDNSLEFLGIQPTLGESKYGPPCPPCPAPEFLGGPSVFLFPPKPKDTLMISRDPEVTCVVVDVSQEDPEVQFNWYVDGVEVHNAKTKPREEQFNSTYRVVSVLQVLHQDWLNGKEYKCKVSNKGLPSSIEKTISKAKGQPREPQVYTLPPSQEEMTKNQVSLTCLVKGFYPSDIAVEWESNGQPENNYKTTPPVLDSDGSFFLYSRLTVDKSRWQEGNVFSCSVMHEALHNHYTQKSLSLSLGVPLSRTVRCTCISISNQPVNPRSLEKLEIIPASQFCPRVEIIATMKKKGEKRCLNPESKAIKNLLKAVSKERSKRSP

SEQ ID NO: 144 - protein, 1018 aa, artificial
  ACE2 18-732 S645C with IgG1 T256D T307Q and IP10
QSTIEEQAKTFLDKFNHEAEDLFYQSSLASWNYNTNITEENVQNMNNAGDKWSAFLKEQSTLAQMYPLQEIQNLTVKLQLQALQQNGSSVLSEDKSKRLNTILNTMSTIYSTGKVCNPDNPQECLLLEPGLNEIMANSLDYNERLWAWESWRSEVGKQLRPLYEEYVVLKNEMARANHYEDYGDYWRGDYEVNGVDGYDYSRGQLIEDVEHTFEEIKPLYEHLHAYVRAKLMNAYPSYISPIGCLPAHLLGDMWGRFWTNLYSLTVPFGQKPNIDVTDAMVDQAWDAQRIFKEAEKFFVSVGLPNMTQGFWENSMLTDPGNVQKAVCHPTAWDLGKGDFRILMCTKVTMDDFLTAHHEMGHIQYDMAYAAQPFLLRNGANEGFHEAVGEIMSLSAATPKHLKSIGLLSPDFQEDNETEINFLLKQALTIVGTLPFTYMLEKWRWMVFKGEIPKDQWMKKWWEMKREIVGVVEPVPHDETYCDPASLFHVSNDYSFIRYYTRTLYQFQFQEALCQAAKHEGPLHKCDISNSTEAGQKLFNMLRLGKSEPWTLALENVVGAKNMNVRPLLNYFEPLFTWLKDQNKNSFVGWSTDWSPYADQSIKVRISLKSALGDKAYEWNDNEMYLFRCSVAYAMRQYFLKVKNQMILFGEEDVRVANLKPRISFNFFVTAPKNVSDIIPRTEVEKAIRMSRSRINDAFRLNDNSLEFLGIQPTLGDKTHTCPPCPAPELLGGPSVFLFPPKPKDTLMISRDPEVTCVVVDVSHEDPEVKFNWYVDGVEVHNAKTKPREEQYNSTYRVVSVLQVLHQDWLNGKEYKCKVSNKALPAPIEKTISKAKGQPREPQVYTLPPSRDELTKNQVSLTCLVKGFYPSDIAVEWESNGQPENNYKTTPPVLDSDGSFFLYSKLTVDKSRWQQGNVFSCSVMHEALHNHYTQKSLSLSPGVPLSRTVRCTCISISNQPVNPRSLEKLEIIPASQFCPRVEIIATMKKKGEKRCLNPESKAIKNLLKAVSKERSKRSP

SEQ ID NO: 145 - protein, 1028 aa, artificial
  ACE2 18-740 S645C with IgG4 T256D T307Q and IP10
QSTIEEQAKTFLDKFNHEAEDLFYQSSLASWNYNTNITEENVQNMNNAGDKWSAFLKEQSTLAQMYPLQEIQNLTVKLQLQALQQNGSSVLSEDKSKRLNTILNTMSTIYSTGKVCNPDNPQECLLLEPGLNEIMANSLDYNERLWAWESWRSEVGKQLRPLYEEYVVLKNEMARANHYEDYGDYWRGDYEVNGVDGYDYSRGQLIEDVEHTFEEIKPLYEHLHAYVRAKLMNAYPSYISPIGCLPAHLLGDMWGRFWTNLYSLTVPFGQKPNIDVTDAMVDQAWDAQRIFKEAEKFFVSVGLPNMTQGFWENSMLTDPGNVQKAVCHPTAWDLGKGDFRILMCTKVTMDDFLTAHHEMGHIQYDMAYAAQPFLLRNGANEGFHEAVGEIMSLSAATPKHLKSIGLLSPDFQEDNETEINFLLKQALTIVGTLPFTYMLEKWRWMVFKGEIPKDQWMKKWWEMKREIVGVVEPVPHDETYCDPASLFHVSNDYSFIRYYTRTLYQFQFQEALCQAAKHEGPLHKCDISNSTEAGQKLFNMLRLGKSEPWTLALENVVGAKNMNVRPLLNYFEPLFTWLKDQNKNSFVGWSTDWSPYADQSIKVRISLKSALGDKAYEWNDNEMYLFRCSVAYAMRQYFLKVKNQMILFGEEDVRVANLKPRISFNFFVTAPKNVSDIIPRTEVEKAIRMSRSRINDAFRLNDNSLEFLGIQPTLGPPNQPPVSESKYGPPCPPCPAPEFLGGPSVFLFPPKPKDTLMISRDPEVTCVVVDVSQEDPEVQFNWYVDGVEVHNAKTKPREEQFNSTYRVVSVLQVLHQDWLNGKEYKCKVSNKGLPSSIEKTISKAKGQPREPQVYTLPPSQEEMTKNQVSLTCLVKGFYPSDIAVEWESNGQPENNYKTTPPVLDSDGSFFLYSRLTVDKSRWQEGNVFSCSVMHEALHNHYTQKSLSLSLGVPLSRTVRCTCISISNQPVNPRSLEKLEIIPASQFCPRVEIIATMKKKGEKRCLNPESKAIKNLLKAVSKERSKRSP

SEQ ID NO: 146 - protein, 1026 aa, artificial
  ACE2 18-740 S645C with IgG1 T256D T307Q and IP10
QSTIEEQAKTFLDKFNHEAEDLFYQSSLASWNYNTNITEENVQNMNNAGDKWSAFLKEQSTLAQMYPLQEIQNLTVKLQLQALQQNGSSVLSEDKSKRLNTILNTMSTIYSTGKVCNPDNPQECLLLEPGLNEIMANSLDYNERLWAWESWRSEVGKQLRPLYEEYVVLKNEMARANHYEDYGDYWRGDYEVNGVDGYDYSRGQLIEDVEHTFEEIKPLYEHLHAYVRAKLMNAYPSYISPIGCLPAHLLGDMWGRFWTNLYSLTVPFGQKPNIDVTDAMVDQAWDAQRIFKEAEKFFVSVGLPNMTQGFWENSMLTDPGNVQKAVCHPTAWDLGKGDFRILMCTKVTMDDFLTAHHEMGHIQYDMAYAAQPFLLRNGANEGFHEAVGEIMSLSAATPKHLKSIGLLSPDFQEDNETEINFLLKQALTIVGTLPFTYMLEKWRWMVFKGEIPKDQWMKKWWEMKREIVGVVEPVPHDETYCDPASLFHVSNDYSFIRYYTRTLYQFQFQEALCQAAKHEGPLHKCDISNSTEAGQKLFNMLRLGKSEPWTLALENVVGAKNMNVRPLLNYFEPLFTWLKDQNKNSFVGWSTDWSPYADQSIKVRISLKSALGDKAYEWNDNEMYLFRCSVAYAMRQYFLKVKNQMILFGEEDVRVANLKPRISFNFFVTAPKNVSDIIPRTEVEKAIRMSRSRINDAFRLNDNSLEFLGIQPTLGPPNQPPVSDKTHTCPPCPAPELLGGPSVFLFPPKPKDTLMISRDPEVTCVVVDVSHEDPEVKFNWYVDGVEVHNAKTKPREEQYNSTYRVVSVLQVLHQDWLNGKEYKCKVSNKALPAPIEKTISKAKGQPREPQVYTLPPSRDELTKNQVSLTCLVKGFYPSDIAVEWESNGQPENNYKTTPPVLDSDGSFFLYSKLTVDKSRWQQGNVFSCSVMHEALHNHYTQKSLSLSPGVPLSRTVRCTCISISNQPVNPRSLEKLEIIPASQFCPRVEIIATMKKKGEKRCLNPESKAIKNLLKAVSKERSKRSP

SEQ ID NO: 147 - protein, 1020 aa, artificial
  ACE2 18-732 H374N H378N S645C with IgG4 wt and IP10
QSTIEEQAKTFLDKFNHEAEDLFYQSSLASWNYNTNITEENVQNMNNAGDKWSAFLKEQSTLAQMYPLQEIQNLTVKLQLQALQQNGSSVLSEDKSKRLNTILNTMSTIYSTGKVCNPDNPQECLLLEPGLNEIMANSLDYNERLWAWESWRSEVGKQLRPLYEEYVVLKNEMARANHYEDYGDYWRGDYEVNGVDGYDYSRGQLIEDVEHTFEEIKPLYEHLHAYVRAKLMNAYPSYISPIGCLPAHLLGDMWGRFWTNLYSLTVPFGQKPNIDVTDAMVDQAWDAQRIFKEAEKFFVSVGLPNMTQGFWENSMLTDPGNVQKAVCHPTAWDLGKGDFRILMCTKVTMDDFLTAHNEMGNIQYDMAYAAQPFLLRNGANEGFHEAVGEIMSLSAATPKHLKSIGLLSPDFQEDNETEINFLLKQALTIVGTLPFTYMLEKWRWMVFKGEIPKDQWMKKWWEMKREIVGVVEPVPHDETYCDPASLFHVSNDYSFIRYYTRTLYQFQFQEALCQAAKHEGPLHKCDISNSTEAGQKLFNMLRLGKSEPWTLALENVVGAKNMNVRPLLNYFEPLFTWLKDQNKNSFVGWSTDWSPYADQSIKVRISLKSALGDKAYEWNDNEMYLFRCSVAYAMRQYFLKVKNQMILFGEEDVRVANLKPRISFNFFVTAPKNVSDIIPRTEVEKAIRMSRSRINDAFRLNDNSLEFLGIQPTLGESKYGPPCPPCPAPEFLGGPSVFLFPPKPKDTLMISRTPEVTCVVVDVSQEDPEVQFNWYVDGVEVHNAKTKPREEQFNSTYRVVSVLTVLHQDWLNGKEYKCKVSNKGLPSSIEKTISKAKGQPREPQVYTLPPSQEEMTKNQVSLTCLVKGFYPSDIAVEWESNGQPENNYKTTPPVLDSDGSFFLYSRLTVDKSRWQEGNVFSCSVMHEALHNHYTQKSLSLSLGVPLSRTVRCTCISISNQPVNPRSLEKLEIIPASQFCPRVEIIATMKKKGEKRCLNPESKAIKNLLKAVSKERSKRSP

SEQ ID NO: 148 - protein, 1018 aa, artificial
  ACE2 18-732 H374N H378N S645C with IgG1 wt and IP10
QSTIEEQAKTFLDKFNHEAEDLFYQSSLASWNYNTNITEENVQNMNNAGDKWSAFLKEQSTLAQMYPLQEIQNLTVKLQLQALQQNGSSVLSEDKSKRLNTILNTMSTIYSTGKVCNPDNPQECLLLEPGLNEIMANSLDYNERLWAWESWRSEVGKQLRPLYEEYVVLKNEMARANHYEDYGDYWRGDYEVNGVDGYDYSRGQLIEDVEHTFEEIKPLYEHLHAYVRAKLMNAYPSYISPIGCLPAHLLGDMWGRFWTNLYSLTVPFGQKPNIDVTDAMVDQAWDAQRIFKEAEKFFVSVGLPNMTQGFWENSMLTDPGNVQKAVCHPTAWDLGKGDFRILMCTKVTMDDFLTAHNEMGNIQYDMAYAAQPFLLRNGANEGFHEAVGEIMSLSAATPKHLKSIGLLSPDFQEDNETEINFLLKQALTIVGTLPFTYMLEKWRWMVFKGEIPKDQWMKKWWEMKREIVGVVEPVPHDETYCDPASLFHVSNDYSFIRYYTRTLYQFQFQEALCQAAKHEGPLHKCDISNSTEAGQKLFNMLRLGKSEPWTLALENVVGAKNMNVRPLLNYFEPLFTWLKDQNKNSFVGWSTDWSPYADQSIKVRISLKSALGDKAYEWNDNEMYLFRCSVAYAMRQYFLKVKNQMILFGEEDVRVANLKPRISFNFFVTAPKNVSDIIPRTEVEKAIRMSRSRINDAFRLNDNSLEFLGIQPTLGDKTHTCPPCPAPELLGGPSVFLFPPKPKDTLMISRTPEVTCVVVDVSHEDPEVKFNWYVDGVEVHNAKTKPREEQYNSTYRVVSVLTVLHQDWLNGKEYKCKVSNKALPAPIEKTISKAKGQPREPQVYTLPPSRDELTKNQVSLTCLVKGFYPSDIAVEWESNGQPENNYKTTPPVLDSDGSFFLYSKLTVDKSRWQQGNVFSCSVMHEALHNHYTQKSLSLSPGVPLSRTVRCTCISISNQPVNPRSLEKLEIIPASQFCPRVEIIATMKKKGEKRCLNPESKAIKNLLKAVSKERSKRSP

SEQ ID NO: 149 - protein, 1028 aa, artificial
  ACE2 18-740 H374N H378N S645C with IgG4 wt and IP10
QSTIEEQAKTFLDKFNHEAEDLFYQSSLASWNYNTNITEENVQNMNNAGDKWSAFLKEQSTLAQMYPLQEIQNLTVKLQLQALQQNGSSVLSEDKSKRLNTILNTMSTIYSTGKVCNPDNPQECLLLEPGLNEIMANSLDYNERLWAWESWRSEVGKQLRPLYEEYVVLKNEMARANHYEDYGDYWRGDYEVNGVDGYDYSRGQLIEDVEHTFEEIKPLYEHLHAYVRAKLMNAYPSYISPIGCLPAHLLGDMWGRFWTNLYSLTVPFGQKPNIDVTDAMVDQAWDAQRIFKEAEKFFVSVGLPNMTQGFWENSMLTDPGNVQKAVCHPTAWDLGKGDFRILMCTKVTMDDFLTAHNEMGNIQYDMAYAAQPFLLRNGANEGFHEAVGEIMSLSAATPKHLKSIGLLSPDFQEDNETEINFLLKQALTIVGTLPFTYMLEKWRWMVFKGEIPKDQWMKKWWEMKREIVGVVEPVPHDETYCDPASLFHVSNDYSFIRYYTRTLYQFQFQEALCQAAKHEGPLHKCDISNSTEAGQKLFNMLRLGKSEPWTLALENVVGAKNMNVRPLLNYFEPLFTWLKDQNKNSFVGWSTDWSPYADQSIKVRISLKSALGDKAYEWNDNEMYLFRCSVAYAMRQYFLKVKNQMILFGEEDVRVANLKPRISFNFFVTAPKNVSDIIPRTEVEKAIRMSRSRINDAFRLNDNSLEFLGIQPTLGPPNQPPVSESKYGPPCPPCPAPEFLGGPSVFLFPPKPKDTLMISRTPEVTCVVVDVSQEDPEVQFNWYVDGVEVHNAKTKPREEQFNSTYRVVSVLTVLHQDWLNGKEYKCKVSNKGLPSSIEKTISKAKGQPREPQVYTLPPSQEEMTKNQVSLTCLVKGFYPSDIAVEWESNGQPENNYKTTPPVLDSDGSFFLYSRLTVDKSRWQEGNVFSCSVMHEALHNHYTQKSLSLSLGVPLSRTVRCTCISISNQPVNPRSLEKLEIIPASQFCPRVEIIATMKKKGEKRCLNPESKAIKNLLKAVSKERSKRSP

SEQ ID NO: 150 - protein, 1026 aa, artificial
  ACE2 18-740 H374N H378N S645C with IgG1 wt and IP10
QSTIEEQAKTFLDKFNHEAEDLFYQSSLASWNYNTNITEENVQNMNNAGDKWSAFLKEQSTLAQMYPLQEIQNLTVKLQLQALQQNGSSVLSEDKSKRLNTILNTMSTIYSTGKVCNPDNPQECLLLEPGLNEIMANSLDYNERLWAWESWRSEVGKQLRPLYEEYVVLKNEMARANHYEDYGDYWRGDYEVNGVDGYDYSRGQLIEDVEHTFEEIKPLYEHLHAYVRAKLMNAYPSYISPIGCLPAHLLGDMWGRFWTNLYSLTVPFGQKPNIDVTDAMVDQAWDAQRIFKEAEKFFVSVGLPNMTQGFWENSMLTDPGNVQKAVCHPTAWDLGKGDFRILMCTKVTMDDFLTAHNEMGNIQYDMAYAAQPFLLRNGANEGFHEAVGEIMSLSAATPKHLKSIGLLSPDFQEDNETEINFLLKQALTIVGTLPFTYMLEKWRWMVFKGEIPKDQWMKKWWEMKREIVGVVEPVPHDETYCDPASLFHVSNDYSFIRYYTRTLYQFQFQEALCQAAKHEGPLHKCDISNSTEAGQKLFNMLRLGKSEPWTLALENVVGAKNMNVRPLLNYFEPLFTWLKDQNKNSFVGWSTDWSPYADQSIKVRISLKSALGDKAYEWNDNEMYLFRCSVAYAMRQYFLKVKNQMILFGEEDVRVANLKPRISFNFFVTAPKNVSDIIPRTEVEKAIRMSRSRINDAFRLNDNSLEFLGIQPTLGPPNQPPVSDKTHTCPPCPAPELLGGPSVFLFPPKPKDTLMISRTPEVTCVVVDVSHEDPEVKFNWYVDGVEVHNAKTKPREEQYNSTYRVVSVLTVLHQDWLNGKEYKCKVSNKALPAPIEKTISKAKGQPREPQVYTLPPSRDELTKNQVSLTCLVKGFYPSDIAVEWESNGQPENNYKTTPPVLDSDGSFFLYSKLTVDKSRWQQGNVFSCSVMHEALHNHYTQKSLSLSPGVPLSRTVRCTCISISNQPVNPRSLEKLEIIPASQFCPRVEIIATMKKKGEKRCLNPESKAIKNLLKAVSKERSKRSP

SEQ ID NO: 151 - protein, 1020 aa, artificial
  ACE2 18-732 H374N H378N S645C with IgG4 YTE and IP10
QSTIEEQAKTFLDKFNHEAEDLFYQSSLASWNYNTNITEENVQNMNNAGDKWSAFLKEQSTLAQMYPLQEIQNLTVKLQLQALQQNGSSVLSEDKSKRLNTILNTMSTIYSTGKVCNPDNPQECLLLEPGLNEIMANSLDYNERLWAWESWRSEVGKQLRPLYEEYVVLKNEMARANHYEDYGDYWRGDYEVNGVDGYDYSRGQLIEDVEHTFEEIKPLYEHLHAYVRAKLMNAYPSYISPIGCLPAHLLGDMWGRFWTNLYSLTVPFGQKPNIDVTDAMVDQAWDAQRIFKEAEKFFVSVGLPNMTQGFWENSMLTDPGNVQKAVCHPTAWDLGKGDFRILMCTKVTMDDFLTAHNEMGNIQYDMAYAAQPFLLRNGANEGFHEAVGEIMSLSAATPKHLKSIGLLSPDFQEDNETEINFLLKQALTIVGTLPFTYMLEKWRWMVFKGEIPKDQWMKKWWEMKREIVGVVEPVPHDETYCDPASLFHVSNDYSFIRYYTRTLYQFQFQEALCQAAKHEGPLHKCDISNSTEAGQKLFNMLRLGKSEPWTLALENVVGAKNMNVRPLLNYFEPLFTWLKDQNKNSFVGWSTDWSPYADQSIKVRISLKSALGDKAYEWNDNEMYLFRCSVAYAMRQYFLKVKNQMILFGEEDVRVANLKPRISFNFFVTAPKNVSDIIPRTEVEKAIRMSRSRINDAFRLNDNSLEFLGIQPTLGESKYGPPCPPCPAPEFLGGPSVFLFPPKPKDTLYITREPEVTCVVVDVSQEDPEVQFNWYVDGVEVHNAKTKPREEQFNSTYRVVSVLTVLHQDWLNGKEYKCKVSNKGLPSSIEKTISKAKGQPREPQVYTLPPSQEEMTKNQVSLTCLVKGFYPSDIAVEWESNGQPENNYKTTPPVLDSDGSFFLYSRLTVDKSRWQEGNVFSCSVMHEALHNHYTQKSLSLSLGVPLSRTVRCTCISISNQPVNPRSLEKLEIIPASQFCPRVEIIATMKKKGEKRCLNPESKAIKNLLKAVSKERSKRSP

SEQ ID NO: 152 - protein, 1018 aa, artificial
  ACE2 18-732 H374N H378N S645C with IgG1 YTE and IP10
QSTIEEQAKTFLDKFNHEAEDLFYQSSLASWNYNTNITEENVQNMNNAGDKWSAFLKEQSTLAQMYPLQEIQNLTVKLQLQALQQNGSSVLSEDKSKRLNTILNTMSTIYSTGKVCNPDNPQECLLLEPGLNEIMANSLDYNERLWAWESWRSEVGKQLRPLYEEYVVLKNEMARANHYEDYGDYWRGDYEVNGVDGYDYSRGQLIEDVEHTFEEIKPLYEHLHAYVRAKLMNAYPSYISPIGCLPAHLLGDMWGRFWTNLYSLTVPFGQKPNIDVTDAMVDQAWDAQRIFKEAEKFFVSVGLPNMTQGFWENSMLTDPGNVQKAVCHPTAWDLGKGDFRILMCTKVTMDDFLTAHNEMGNIQYDMAYAAQPFLLRNGANEGFHEAVGEIMSLSAATPKHLKSIGLLSPDFQEDNETEINFLLKQALTIVGTLPFTYMLEKWRWMVFKGEIPKDQWMKKWWEMKREIVGVVEPVPHDETYCDPASLFHVSNDYSFIRYYTRTLYQFQFQEALCQAAKHEGPLHKCDISNSTEAGQKLFNMLRLGKSEPWTLALENVVGAKNMNVRPLLNYFEPLFTWLKDQNKNSFVGWSTDWSPYADQSIKVRISLKSALGDKAYEWNDNEMYLFRCSVAYAMRQYFLKVKNQMILFGEEDVRVANLKPRISFNFFVTAPKNVSDIIPRTEVEKAIRMSRSRINDAFRLNDNSLEFLGIQPTLGDKTHTCPPCPAPELLGGPSVFLFPPKPKDTLYITREPEVTCVVVDVSHEDPEVKFNWYVDGVEVHNAKTKPREEQYNSTYRVVSVLTVLHQDWLNGKEYKCKVSNKALPAPIEKTISKAKGQPREPQVYTLPPSRDELTKNQVSLTCLVKGFYPSDIAVEWESNGQPENNYKTTPPVLDSDGSFFLYSKLTVDKSRWQQGNVFSCSVMHEALHNHYTQKSLSLSPGVPLSRTVRCTCISISNQPVNPRSLEKLEIIPASQFCPRVEIIATMKKKGEKRCLNPESKAIKNLLKAVSKERSKRSP

SEQ ID NO: 153 - protein, 1028 aa, artificial
  ACE2 18-740 H374N H378N S645C with IgG4 YTE and IP10
QSTIEEQAKTFLDKFNHEAEDLFYQSSLASWNYNTNITEENVQNMNNAGDKWSAFLKEQSTLAQMYPLQEIQNLTVKLQLQALQQNGSSVLSEDKSKRLNTILNTMSTIYSTGKVCNPDNPQECLLLEPGLNEIMANSLDYNERLWAWESWRSEVGKQLRPLYEEYVVLKNEMARANHYEDYGDYWRGDYEVNGVDGYDYSRGQLIEDVEHTFEEIKPLYEHLHAYVRAKLMNAYPSYISPIGCLPAHLLGDMWGRFWTNLYSLTVPFGQKPNIDVTDAMVDQAWDAQRIFKEAEKFFVSVGLPNMTQGFWENSMLTDPGNVQKAVCHPTAWDLGKGDFRILMCTKVTMDDFLTAHNEMGNIQYDMAYAAQPFLLRNGANEGFHEAVGEIMSLSAATPKHLKSIGLLSPDFQEDNETEINFLLKQALTIVGTLPFTYMLEKWRWMVFKGEIPKDQWMKKWWEMKREIVGVVEPVPHDETYCDPASLFHVSNDYSFIRYYTRTLYQFQFQEALCQAAKHEGPLHKCDISNSTEAGQKLFNMLRLGKSEPWTLALENVVGAKNMNVRPLLNYFEPLFTWLKDQNKNSFVGWSTDWSPYADQSIKVRISLKSALGDKAYEWNDNEMYLFRCSVAYAMRQYFLKVKNQMILFGEEDVRVANLKPRISFNFFVTAPKNVSDIIPRTEVEKAIRMSRSRINDAFRLNDNSLEFLGIQPTLGPPNQPPVSESKYGPPCPPCPAPEFLGGPSVFLFPPKPKDTLYITREPEVTCVVVDVSQEDPEVQFNWYVDGVEVHNAKTKPREEQFNSTYRVVSVLTVLHQDWLNGKEYKCKVSNKGLPSSIEKTISKAKGQPREPQVYTLPPSQEEMTKNQVSLTCLVKGFYPSDIAVEWESNGQPENNYKTTPPVLDSDGSFFLYSRLTVDKSRWQEGNVFSCSVMHEALHNHYTQKSLSLSLGVPLSRTVRCTCISISNQPVNPRSLEKLEIIPASQFCPRVEIIATMKKKGEKRCLNPESKAIKNLLKAVSKERSKRSP

SEQ ID NO: 154 - protein, 1026 aa, artificial
  ACE2 18-740 H374N H378N S645C with IgG1 YTE and IP10
QSTIEEQAKTFLDKFNHEAEDLFYQSSLASWNYNTNITEENVQNMNNAGDKWSAFLKEQSTLAQMYPLQEIQNLTVKLQLQALQQNGSSVLSEDKSKRLNTILNTMSTIYSTGKVCNPDNPQECLLLEPGLNEIMANSLDYNERLWAWESWRSEVGKQLRPLYEEYVVLKNEMARANHYEDYGDYWRGDYEVNGVDGYDYSRGQLIEDVEHTFEEIKPLYEHLHAYVRAKLMNAYPSYISPIGCLPAHLLGDMWGRFWTNLYSLTVPFGQKPNIDVTDAMVDQAWDAQRIFKEAEKFFVSVGLPNMTQGFWENSMLTDPGNVQKAVCHPTAWDLGKGDFRILMCTKVTMDDFLTAHNEMGNIQYDMAYAAQPFLLRNGANEGFHEAVGEIMSLSAATPKHLKSIGLLSPDFQEDNETEINFLLKQALTIVGTLPFTYMLEKWRWMVFKGEIPKDQWMKKWWEMKREIVGVVEPVPHDETYCDPASLFHVSNDYSFIRYYTRTLYQFQFQEALCQAAKHEGPLHKCDISNSTEAGQKLFNMLRLGKSEPWTLALENVVGAKNMNVRPLLNYFEPLFTWLKDQNKNSFVGWSTDWSPYADQSIKVRISLKSALGDKAYEWNDNEMYLFRCSVAYAMRQYFLKVKNQMILFGEEDVRVANLKPRISFNFFVTAPKNVSDIIPRTEVEKAIRMSRSRINDAFRLNDNSLEFLGIQPTLGPPNQPPVSDKTHTCPPCPAPELLGGPSVFLFPPKPKDTLYITREPEVTCVVVDVSHEDPEVKFNWYVDGVEVHNAKTKPREEQYNSTYRVVSVLTVLHQDWLNGKEYKCKVSNKALPAPIEKTISKAKGQPREPQVYTLPPSRDELTKNQVSLTCLVKGFYPSDIAVEWESNGQPENNYKTTPPVLDSDGSFFLYSKLTVDKSRWQQGNVFSCSVMHEALHNHYTQKSLSLSPGVPLSRTVRCTCISISNQPVNPRSLEKLEIIPASQFCPRVEIIATMKKKGEKRCLNPESKAIKNLLKAVSKERSKRSP

SEQ ID NO: 155 - protein, 1020 aa, artificial
  ACE2 18-732 H374N H378N S645C with IgG4 T256D T307Q and IP10
QSTIEEQAKTFLDKFNHEAEDLFYQSSLASWNYNTNITEENVQNMNNAGDKWSAFLKEQSTLAQMYPLQEIQNLTVKLQLQALQQNGSSVLSEDKSKRLNTILNTMSTIYSTGKVCNPDNPQECLLLEPGLNEIMANSLDYNERLWAWESWRSEVGKQLRPLYEEYVVLKNEMARANHYEDYGDYWRGDYEVNGVDGYDYSRGQLIEDVEHTFEEIKPLYEHLHAYVRAKLMNAYPSYISPIGCLPAHLLGDMWGRFWTNLYSLTVPFGQKPNIDVTDAMVDQAWDAQRIFKEAEKFFVSVGLPNMTQGFWENSMLTDPGNVQKAVCHPTAWDLGKGDFRILMCTKVTMDDFLTAHNEMGNIQYDMAYAAQPFLLRNGANEGFHEAVGEIMSLSAATPKHLKSIGLLSPDFQEDNETEINFLLKQALTIVGTLPFTYMLEKWRWMVFKGEIPKDQWMKKWWEMKREIVGVVEPVPHDETYCDPASLFHVSNDYSFIRYYTRTLYQFQFQEALCQAAKHEGPLHKCDISNSTEAGQKLFNMLRLGKSEPWTLALENVVGAKNMNVRPLLNYFEPLFTWLKDQNKNSFVGWSTDWSPYADQSIKVRISLKSALGDKAYEWNDNEMYLFRCSVAYAMRQYFLKVKNQMILFGEEDVRVANLKPRISFNFFVTAPKNVSDIIPRTEVEKAIRMSRSRINDAFRLNDNSLEFLGIQPTLGESKYGPPCPPCPAPEFLGGPSVFLFPPKPKDTLMISRDPEVTCVVVDVSQEDPEVQFNWYVDGVEVHNAKTKPREEQFNSTYRVVSVLQVLHQDWLNGKEYKCKVSNKGLPSSIEKTISKAKGQPREPQVYTLPPSQEEMTKNQVSLTCLVKGFYPSDIAVEWESNGQPENNYKTTPPVLDSDGSFFLYSRLTVDKSRWQEGNVFSCSVMHEALHNHYTQKSLSLSLGVPLSRTVRCTCISISNQPVNPRSLEKLEIIPASQFCPRVEIIATMKKKGEKRCLNPESKAIKNLLKAVSKERSKRSP

SEQ ID NO: 156 - protein, 1018 aa, artificial
  ACE2 18-732 H374N H378N S645C with IgG1 T256D T307Q and IP10
QSTIEEQAKTFLDKFNHEAEDLFYQSSLASWNYNTNITEENVQNMNNAGDKWSAFLKEQSTLAQMYPLQEIQNLTVKLQLQALQQNGSSVLSEDKSKRLNTILNTMSTIYSTGKVCNPDNPQECLLLEPGLNEIMANSLDYNERLWAWESWRSEVGKQLRPLYEEYVVLKNEMARANHYEDYGDYWRGDYEVNGVDGYDYSRGQLIEDVEHTFEEIKPLYEHLHAYVRAKLMNAYPSYISPIGCLPAHLLGDMWGRFWTNLYSLTVPFGQKPNIDVTDAMVDQAWDAQRIFKEAEKFFVSVGLPNMTQGFWENSMLTDPGNVQKAVCHPTAWDLGKGDFRILMCTKVTMDDFLTAHNEMGNIQYDMAYAAQPFLLRNGANEGFHEAVGEIMSLSAATPKHLKSIGLLSPDFQEDNETEINFLLKQALTIVGTLPFTYMLEKWRWMVFKGEIPKDQWMKKWWEMKREIVGVVEPVPHDETYCDPASLFHVSNDYSFIRYYTRTLYQFQFQEALCQAAKHEGPLHKCDISNSTEAGQKLFNMLRLGKSEPWTLALENVVGAKNMNVRPLLNYFEPLFTWLKDQNKNSFVGWSTDWSPYADQSIKVRISLKSALGDKAYEWNDNEMYLFRCSVAYAMRQYFLKVKNQMILFGEEDVRVANLKPRISFNFFVTAPKNVSDIIPRTEVEKAIRMSRSRINDAFRLNDNSLEFLGIQPTLGDKTHTCPPCPAPELLGGPSVFLFPPKPKDTLMISRDPEVTCVVVDVSHEDPEVKFNWYVDGVEVHNAKTKPREEQYNSTYRVVSVLQVLHQDWLNGKEYKCKVSNKALPAPIEKTISKAKGQPREPQVYTLPPSRDELTKNQVSLTCLVKGFYPSDIAVEWESNGQPENNYKTTPPVLDSDGSFFLYSKLTVDKSRWQQGNVFSCSVMHEALHNHYTQKSLSLSPGVPLSRTVRCTCISISNQPVNPRSLEKLEIIPASQFCPRVEIIATMKKKGEKRCLNPESKAIKNLLKAVSKERSKRSP

SEQ ID NO: 157 - protein, 1028 aa, artificial
  ACE2 18-740 H374N H378N S645C with IgG4 T256D T307Q and IP10
QSTIEEQAKTFLDKFNHEAEDLFYQSSLASWNYNTNITEENVQNMNNAGDKWSAFLKEQSTLAQMYPLQEIQNLTVKLQLQALQQNGSSVLSEDKSKRLNTILNTMSTIYSTGKVCNPDNPQECLLLEPGLNEIMANSLDYNERLWAWESWRSEVGKQLRPLYEEYVVLKNEMARANHYEDYGDYWRGDYEVNGVDGYDYSRGQLIEDVEHTFEEIKPLYEHLHAYVRAKLMNAYPSYISPIGCLPAHLLGDMWGRFWTNLYSLTVPFGQKPNIDVTDAMVDQAWDAQRIFKEAEKFFVSVGLPNMTQGFWENSMLTDPGNVQKAVCHPTAWDLGKGDFRILMCTKVTMDDFLTAHNEMGNIQYDMAYAAQPFLLRNGANEGFHEAVGEIMSLSAATPKHLKSIGLLSPDFQEDNETEINFLLKQALTIVGTLPFTYMLEKWRWMVFKGEIPKDQWMKKWWEMKREIVGVVEPVPHDETYCDPASLFHVSNDYSFIRYYTRTLYQFQFQEALCQAAKHEGPLHKCDISNSTEAGQKLFNMLRLGKSEPWTLALENVVGAKNMNVRPLLNYFEPLFTWLKDQNKNSFVGWSTDWSPYADQSIKVRISLKSALGDKAYEWNDNEMYLFRCSVAYAMRQYFLKVKNQMILFGEEDVRVANLKPRISFNFFVTAPKNVSDIIPRTEVEKAIRMSRSRINDAFRLNDNSLEFLGIQPTLGPPNQPPVSESKYGPPCPPCPAPEFLGGPSVFLFPPKPKDTLMISRDPEVTCVVVDVSQEDPEVQFNWYVDGVEVHNAKTKPREEQFNSTYRVVSVLQVLHQDWLNGKEYKCKVSNKGLPSSIEKTISKAKGQPREPQVYTLPPSQEEMTKNQVSLTCLVKGFYPSDIAVEWESNGQPENNYKTTPPVLDSDGSFFLYSRLTVDKSRWQEGNVFSCSVMHEALHNHYTQKSLSLSLGVPLSRTVRCTCISISNQPVNPRSLEKLEIIPASQFCPRVEIIATMKKKGEKRCLNPESKAIKNLLKAVSKERSKRSP

SEQ ID NO: 158 - protein, 1026 aa, artificial
  ACE2 18-740 H374N H378N S645C with IgG1 T256D T307 Q and IP10
QSTIEEQAKTFLDKFNHEAEDLFYQSSLASWNYNTNITEENVQNMNNAGDKWSAFLKEQSTLAQMYPLQEIQNLTVKLQLQALQQNGSSVLSEDKSKRLNTILNTMSTIYSTGKVCNPDNPQECLLLEPGLNEIMANSLDYNERLWAWESWRSEVGKQLRPLYEEYVVLKNEMARANHYEDYGDYWRGDYEVNGVDGYDYSRGQLIEDVEHTFEEIKPLYEHLHAYVRAKLMNAYPSYISPIGCLPAHLLGDMWGRFWTNLYSLTVPFGQKPNIDVTDAMVDQAWDAQRIFKEAEKFFVSVGLPNMTQGFWENSMLTDPGNVQKAVCHPTAWDLGKGDFRILMCTKVTMDDFLTAHNEMGNIQYDMAYAAQPFLLRNGANEGFHEAVGEIMSLSAATPKHLKSIGLLSPDFQEDNETEINFLLKQALTIVGTLPFTYMLEKWRWMVFKGEIPKDQWMKKWWEMKREIVGVVEPVPHDETYCDPASLFHVSNDYSFIRYYTRTLYQFQFQEALCQAAKHEGPLHKCDISNSTEAGQKLFNMLRLGKSEPWTLALENVVGAKNMNVRPLLNYFEPLFTWLKDQNKNSFVGWSTDWSPYADQSIKVRISLKSALGDKAYEWNDNEMYLFRCSVAYAMRQYFLKVKNQMILFGEEDVRVANLKPRISFNFFVTAPKNVSDIIPRTEVEKAIRMSRSRINDAFRLNDNSLEFLGIQPTLGPPNQPPVSDKTHTCPPCPAPELLGGPSVFLFPPKPKDTLMISRDPEVTCVVVDVSHEDPEVKFNWYVDGVEVHNAKTKPREEQYNSTYRVVSVLQVLHQDWLNGKEYKCKVSNKALPAPIEKTISKAKGQPREPQVYTLPPSRDELTKNQVSLTCLVKGFYPSDIAVEWESNGQPENNYKTTPPVLDSDGSFFLYSKLTVDKSRWQQGNVFSCSVMHEALHNHYTQKSLSLSPGVPLSRTVRCTCISISNQPVNPRSLEKLEIIPASQFCPRVEIIATMKKKGEKRCLNPESKAIKNLLKAVSKERSKRSP

SEQ ID NO: 159 - protein, 1020 aa, artificial
  ACE2 18-732 R273A S645C with IgG4 wt and IP10
QSTIEEQAKTFLDKFNHEAEDLFYQSSLASWNYNTNITEENVQNMNNAGDKWSAFLKEQSTLAQMYPLQEIQNLTVKLQLQALQQNGSSVLSEDKSKRLNTILNTMSTIYSTGKVCNPDNPQECLLLEPGLNEIMANSLDYNERLWAWESWRSEVGKQLRPLYEEYVVLKNEMARANHYEDYGDYWRGDYEVNGVDGYDYSRGQLIEDVEHTFEEIKPLYEHLHAYVRAKLMNAYPSYISPIGCLPAHLLGDMWGAFWTNLYSLTVPFGQKPNIDVTDAMVDQAWDAQRIFKEAEKFFVSVGLPNMTQGFWENSMLTDPGNVQKAVCHPTAWDLGKGDFRILMCTKVTMDDFLTAHHEMGHIQYDMAYAAQPFLLRNGANEGFHEAVGEIMSLSAATPKHLKSIGLLSPDFQEDNETEINFLLKQALTIVGTLPFTYMLEKWRWMVFKGEIPKDQWMKKWWEMKREIVGVVEPVPHDETYCDPASLFHVSNDYSFIRYYTRTLYQFQFQEALCQAAKHEGPLHKCDISNSTEAGQKLFNMLRLGKSEPWTLALENVVGAKNMNVRPLLNYFEPLFTWLKDQNKNSFVGWSTDWSPYADQSIKVRISLKSALGDKAYEWNDNEMYLFRCSVAYAMRQYFLKVKNQMILFGEEDVRVANLKPRISFNFFVTAPKNVSDIIPRTEVEKAIRMSRSRINDAFRLNDNSLEFLGIQPTLGESKYGPPCPPCPAPEFLGGPSVFLFPPKPKDTLMISRTPEVTCVVVDVSQEDPEVQFNWYVDGVEVHNAKTKPREEQFNSTYRVVSVLTVLHQDWLNGKEYKCKVSNKGLPSSIEKTISKAKGQPREPQVYTLPPSQEEMTKNQVSLTCLVKGFYPSDIAVEWESNGQPENNYKTTPPVLDSDGSFFLYSRLTVDKSRWQEGNVFSCSVMHEALHNHYTQKSLSLSLGVPLSRTVRCTCISISNQPVNPRSLEKLEIIPASQFCPRVEIIATMKKKGEKRCLNPESKAIKNLLKAVSKERSKRSP

SEQ ID NO: 160 - protein, 1018 aa, artificial
  ACE2 18-732 R273A S645C with IgG1 wt and IP10
QSTIEEQAKTFLDKFNHEAEDLFYQSSLASWNYNTNITEENVQNMNNAGDKWSAFLKEQSTLAQMYPLQEIQNLTVKLQLQALQQNGSSVLSEDKSKRLNTILNTMSTIYSTGKVCNPDNPQECLLLEPGLNEIMANSLDYNERLWAWESWRSEVGKQLRPLYEEYVVLKNEMARANHYEDYGDYWRGDYEVNGVDGYDYSRGQLIEDVEHTFEEIKPLYEHLHAYVRAKLMNAYPSYISPIGCLPAHLLGDMWGAFWTNLYSLTVPFGQKPNIDVTDAMVDQAWDAQRIFKEAEKFFVSVGLPNMTQGFWENSMLTDPGNVQKAVCHPTAWDLGKGDFRILMCTKVTMDDFLTAHHEMGHIQYDMAYAAQPFLLRNGANEGFHEAVGEIMSLSAATPKHLKSIGLLSPDFQEDNETEINFLLKQALTIVGTLPFTYMLEKWRWMVFKGEIPKDQWMKKWWEMKREIVGVVEPVPHDETYCDPASLFHVSNDYSFIRYYTRTLYQFQFQEALCQAAKHEGPLHKCDISNSTEAGQKLFNMLRLGKSEPWTLALENVVGAKNMNVRPLLNYFEPLFTWLKDQNKNSFVGWSTDWSPYADQSIKVRISLKSALGDKAYEWNDNEMYLFRCSVAYAMRQYFLKVKNQMILFGEEDVRVANLKPRISFNFFVTAPKNVSDIIPRTEVEKAIRMSRSRINDAFRLNDNSLEFLGIQPTLGDKTHTCPPCPAPELLGGPSVFLFPPKPKDTLMISRTPEVTCVVVDVSHEDPEVKFNWYVDGVEVHNAKTKPREEQYNSTYRVVSVLTVLHQDWLNGKEYKCKVSNKALPAPIEKTISKAKGQPREPQVYTLPPSRDELTKNQVSLTCLVKGFYPSDIAVEWESNGQPENNYKTTPPVLDSDGSFFLYSKLTVDKSRWQQGNVFSCSVMHEALHNHYTQKSLSLSPGVPLSRTVRCTCISISNQPVNPRSLEKLEIIPASQFCPRVEIIATMKKKGEKRCLNPESKAIKNLLKAVSKERSKRSP

SEQ ID NO: 161 - protein, 1028 aa, artificial
  ACE2 18-740 R273A S645C with IgG4 wt and IP10
QSTIEEQAKTFLDKFNHEAEDLFYQSSLASWNYNTNITEENVQNMNNAGDKWSAFLKEQSTLAQMYPLQEIQNLTVKLQLQALQQNGSSVLSEDKSKRLNTILNTMSTIYSTGKVCNPDNPQECLLLEPGLNEIMANSLDYNERLWAWESWRSEVGKQLRPLYEEYVVLKNEMARANHYEDYGDYWRGDYEVNGVDGYDYSRGQLIEDVEHTFEEIKPLYEHLHAYVRAKLMNAYPSYISPIGCLPAHLLGDMWGAFWTNLYSLTVPFGQKPNIDVTDAMVDQAWDAQRIFKEAEKFFVSVGLPNMTQGFWENSMLTDPGNVQKAVCHPTAWDLGKGDFRILMCTKVTMDDFLTAHHEMGHIQYDMAYAAQPFLLRNGANEGFHEAVGEIMSLSAATPKHLKSIGLLSPDFQEDNETEINFLLKQALTIVGTLPFTYMLEKWRWMVFKGEIPKDQWMKKWWEMKREIVGVVEPVPHDETYCDPASLFHVSNDYSFIRYYTRTLYQFQFQEALCQAAKHEGPLHKCDISNSTEAGQKLFNMLRLGKSEPWTLALENVVGAKNMNVRPLLNYFEPLFTWLKDQNKNSFVGWSTDWSPYADQSIKVRISLKSALGDKAYEWNDNEMYLFRCSVAYAMRQYFLKVKNQMILFGEEDVRVANLKPRISFNFFVTAPKNVSDIIPRTEVEKAIRMSRSRINDAFRLNDNSLEFLGIQPTLGPPNQPPVSESKYGPPCPPCPAPEFLGGPSVFLFPPKPKDTLMISRTPEVTCVVVDVSQEDPEVQFNWYVDGVEVHNAKTKPREEQFNSTYRVVSVLTVLHQDWLNGKEYKCKVSNKGLPSSIEKTISKAKGQPREPQVYTLPPSQEEMTKNQVSLTCLVKGFYPSDIAVEWESNGQPENNYKTTPPVLDSDGSFFLYSRLTVDKSRWQEGNVFSCSVMHEALHNHYTQKSLSLSLGVPLSRTVRCTCISISNQPVNPRSLEKLEIIPASQFCPRVEIIATMKKKGEKRCLNPESKAIKNLLKAVSKERSKRSP

SEQ ID NO: 162 - protein, 1026 aa, artificial
  ACE2 18-740 R273A S645C with IgG1 wt and IP10
QSTIEEQAKTFLDKFNHEAEDLFYQSSLASWNYNTNITEENVQNMNNAGDKWSAFLKEQSTLAQMYPLQEIQNLTVKLQLQALQQNGSSVLSEDKSKRLNTILNTMSTIYSTGKVCNPDNPQECLLLEPGLNEIMANSLDYNERLWAWESWRSEVGKQLRPLYEEYVVLKNEMARANHYEDYGDYWRGDYEVNGVDGYDYSRGQLIEDVEHTFEEIKPLYEHLHAYVRAKLMNAYPSYISPIGCLPAHLLGDMWGAFWTNLYSLTVPFGQKPNIDVTDAMVDQAWDAQRIFKEAEKFFVSVGLPNMTQGFWENSMLTDPGNVQKAVCHPTAWDLGKGDFRILMCTKVTMDDFLTAHHEMGHIQYDMAYAAQPFLLRNGANEGFHEAVGEIMSLSAATPKHLKSIGLLSPDFQEDNETEINFLLKQALTIVGTLPFTYMLEKWRWMVFKGEIPKDQWMKKWWEMKREIVGVVEPVPHDETYCDPASLFHVSNDYSFIRYYTRTLYQFQFQEALCQAAKHEGPLHKCDISNSTEAGQKLFNMLRLGKSEPWTLALENVVGAKNMNVRPLLNYFEPLFTWLKDQNKNSFVGWSTDWSPYADQSIKVRISLKSALGDKAYEWNDNEMYLFRCSVAYAMRQYFLKVKNQMILFGEEDVRVANLKPRISFNFFVTAPKNVSDIIPRTEVEKAIRMSRSRINDAFRLNDNSLEFLGIQPTLGPPNQPPVSDKTHTCPPCPAPELLGGPSVFLFPPKPKDTLMISRTPEVTCVVVDVSHEDPEVKFNWYVDGVEVHNAKTKPREEQYNSTYRVVSVLTVLHQDWLNGKEYKCKVSNKALPAPIEKTISKAKGQPREPQVYTLPPSRDELTKNQVSLTCLVKGFYPSDIAVEWESNGQPENNYKTTPPVLDSDGSFFLYSKLTVDKSRWQQGNVFSCSVMHEALHNHYTQKSLSLSPGVPLSRTVRCTCISISNQPVNPRSLEKLEIIPASQFCPRVEIIATMKKKGEKRCLNPESKAIKNLLKAVSKERSKRSP

SEQ ID NO: 163 - protein, 1020 aa, artificial
  ACE2 18-732 R273A S645C with IgG4 YTE and IP10
QSTIEEQAKTFLDKFNHEAEDLFYQSSLASWNYNTNITEENVQNMNNAGDKWSAFLKEQSTLAQMYPLQEIQNLTVKLQLQALQQNGSSVLSEDKSKRLNTILNTMSTIYSTGKVCNPDNPQECLLLEPGLNEIMANSLDYNERLWAWESWRSEVGKQLRPLYEEYVVLKNEMARANHYEDYGDYWRGDYEVNGVDGYDYSRGQLIEDVEHTFEEIKPLYEHLHAYVRAKLMNAYPSYISPIGCLPAHLLGDMWGAFWTNLYSLTVPFGQKPNIDVTDAMVDQAWDAQRIFKEAEKFFVSVGLPNMTQGFWENSMLTDPGNVQKAVCHPTAWDLGKGDFRILMCTKVTMDDFLTAHHEMGHIQYDMAYAAQPFLLRNGANEGFHEAVGEIMSLSAATPKHLKSIGLLSPDFQEDNETEINFLLKQALTIVGTLPFTYMLEKWRWMVFKGEIPKDQWMKKWWEMKREIVGVVEPVPHDETYCDPASLFHVSNDYSFIRYYTRTLYQFQFQEALCQAAKHEGPLHKCDISNSTEAGQKLFNMLRLGKSEPWTLALENVVGAKNMNVRPLLNYFEPLFTWLKDQNKNSFVGWSTDWSPYADQSIKVRISLKSALGDKAYEWNDNEMYLFRCSVAYAMRQYFLKVKNQMILFGEEDVRVANLKPRISFNFFVTAPKNVSDIIPRTEVEKAIRMSRSRINDAFRLNDNSLEFLGIQPTLGESKYGPPCPPCPAPEFLGGPSVFLFPPKPKDTLYITREPEVTCVVVDVSQEDPEVQFNWYVDGVEVHNAKTKPREEQFNSTYRVVSVLTVLHQDWLNGKEYKCKVSNKGLPSSIEKTISKAKGQPREPQVYTLPPSQEEMTKNQVSLTCLVKGFYPSDIAVEWESNGQPENNYKTTPPVLDSDGSFFLYSRLTVDKSRWQEGNVFSCSVMHEALHNHYTQKSLSLSLGVPLSRTVRCTCISISNQPVNPRSLEKLEIIPASQFCPRVEIIATMKKKGEKRCLNPESKAIKNLLKAVSKERSKRSP

SEQ ID NO: 164 - protein, 1018 aa, artificial
  ACE2 18-732 R273A S645C IgG1 YTE IP10
QSTIEEQAKTFLDKFNHEAEDLFYQSSLASWNYNTNITEENVQNMNNAGDKWSAFLKEQSTLAQMYPLQEIQNLTVKLQLQALQQNGSSVLSEDKSKRLNTILNTMSTIYSTGKVCNPDNPQECLLLEPGLNEIMANSLDYNERLWAWESWRSEVGKQLRPLYEEYVVLKNEMARANHYEDYGDYWRGDYEVNGVDGYDYSRGQLIEDVEHTFEEIKPLYEHLHAYVRAKLMNAYPSYISPIGCLPAHLLGDMWGAFWTNLYSLTVPFGQKPNIDVTDAMVDQAWDAQRIFKEAEKFFVSVGLPNMTQGFWENSMLTDPGNVQKAVCHPTAWDLGKGDFRILMCTKVTMDDFLTAHHEMGHIQYDMAYAAQPFLLRNGANEGFHEAVGEIMSLSAATPKHLKSIGLLSPDFQEDNETEINFLLKQALTIVGTLPFTYMLEKWRWMVFKGEIPKDQWMKKWWEMKREIVGVVEPVPHDETYCDPASLFHVSNDYSFIRYYTRTLYQFQFQEALCQAAKHEGPLHKCDISNSTEAGQKLFNMLRLGKSEPWTLALENVVGAKNMNVRPLLNYFEPLFTWLKDQNKNSFVGWSTDWSPYADQSIKVRISLKSALGDKAYEWNDNEMYLFRCSVAYAMRQYFLKVKNQMILFGEEDVRVANLKPRISFNFFVTAPKNVSDIIPRTEVEKAIRMSRSRINDAFRLNDNSLEFLGIQPTLGDKTHTCPPCPAPELLGGPSVFLFPPKPKDTLYITREPEVTCVVVDVSHEDPEVKFNWYVDGVEVHNAKTKPREEQYNSTYRVVSVLTVLHQDWLNGKEYKCKVSNKALPAPIEKTISKAKGQPREPQVYTLPPSRDELTKNQVSLTCLVKGFYPSDIAVEWESNGQPENNYKTTPPVLDSDGSFFLYSKLTVDKSRWQQGNVFSCSVMHEALHNHYTQKSLSLSPGVPLSRTVRCTCISISNQPVNPRSLEKLEIIPASQFCPRVEIIATMKKKGEKRCLNPESKAIKNLLKAVSKERSKRSP

SEQ ID NO: 165 - protein, 1028 aa, artificial
  ACE2 18-740 R273A S645C with IgG4 YTE IP10
QSTIEEQAKTFLDKFNHEAEDLFYQSSLASWNYNTNITEENVQNMNNAGDKWSAFLKEQSTLAQMYPLQEIQNLTVKLQLQALQQNGSSVLSEDKSKRLNTILNTMSTIYSTGKVCNPDNPQECLLLEPGLNEIMANSLDYNERLWAWESWRSEVGKQLRPLYEEYVVLKNEMARANHYEDYGDYWRGDYEVNGVDGYDYSRGQLIEDVEHTFEEIKPLYEHLHAYVRAKLMNAYPSYISPIGCLPAHLLGDMWGAFWTNLYSLTVPFGQKPNIDVTDAMVDQAWDAQRIFKEAEKFFVSVGLPNMTQGFWENSMLTDPGNVQKAVCHPTAWDLGKGDFRILMCTKVTMDDFLTAHHEMGHIQYDMAYAAQPFLLRNGANEGFHEAVGEIMSLSAATPKHLKSIGLLSPDFQEDNETEINFLLKQALTIVGTLPFTYMLEKWRWMVFKGEIPKDQWMKKWWEMKREIVGVVEPVPHDETYCDPASLFHVSNDYSFIRYYTRTLYQFQFQEALCQAAKHEGPLHKCDISNSTEAGQKLFNMLRLGKSEPWTLALENVVGAKNMNVRPLLNYFEPLFTWLKDQNKNSFVGWSTDWSPYADQSIKVRISLKSALGDKAYEWNDNEMYLFRCSVAYAMRQYFLKVKNQMILFGEEDVRVANLKPRISFNFFVTAPKNVSDIIPRTEVEKAIRMSRSRINDAFRLNDNSLEFLGIQPTLGPPNQPPVSESKYGPPCPPCPAPEFLGGPSVFLFPPKPKDTLYITREPEVTCVVVDVSQEDPEVQFNWYVDGVEVHNAKTKPREEQFNSTYRVVSVLTVLHQDWLNGKEYKCKVSNKGLPSSIEKTISKAKGQPREPQVYTLPPSQEEMTKNQVSLTCLVKGFYPSDIAVEWESNGQPENNYKTTPPVLDSDGSFFLYSRLTVDKSRWQEGNVFSCSVMHEALHNHYTQKSLSLSLGVPLSRTVRCTCISISNQPVNPRSLEKLEIIPASQFCPRVEIIATMKKKGEKRCLNPESKAIKNLLKAVSKERSKRSP

SEQ ID NO: 166 - protein, 1026 aa, artificial
  ACE2 18-740 R273A S645C with IgG1 YTE and IP10
QSTIEEQAKTFLDKFNHEAEDLFYQSSLASWNYNTNITEENVQNMNNAGDKWSAFLKEQSTLAQMYPLQEIQNLTVKLQLQALQQNGSSVLSEDKSKRLNTILNTMSTIYSTGKVCNPDNPQECLLLEPGLNEIMANSLDYNERLWAWESWRSEVGKQLRPLYEEYVVLKNEMARANHYEDYGDYWRGDYEVNGVDGYDYSRGQLIEDVEHTFEEIKPLYEHLHAYVRAKLMNAYPSYISPIGCLPAHLLGDMWGAFWTNLYSLTVPFGQKPNIDVTDAMVDQAWDAQRIFKEAEKFFVSVGLPNMTQGFWENSMLTDPGNVQKAVCHPTAWDLGKGDFRILMCTKVTMDDFLTAHHEMGHIQYDMAYAAQPFLLRNGANEGFHEAVGEIMSLSAATPKHLKSIGLLSPDFQEDNETEINFLLKQALTIVGTLPFTYMLEKWRWMVFKGEIPKDQWMKKWWEMKREIVGVVEPVPHDETYCDPASLFHVSNDYSFIRYYTRTLYQFQFQEALCQAAKHEGPLHKCDISNSTEAGQKLFNMLRLGKSEPWTLALENVVGAKNMNVRPLLNYFEPLFTWLKDQNKNSFVGWSTDWSPYADQSIKVRISLKSALGDKAYEWNDNEMYLFRCSVAYAMRQYFLKVKNQMILFGEEDVRVANLKPRISFNFFVTAPKNVSDIIPRTEVEKAIRMSRSRINDAFRLNDNSLEFLGIQPTLGPPNQPPVSDKTHTCPPCPAPELLGGPSVFLFPPKPKDTLYITREPEVTCVVVDVSHEDPEVKFNWYVDGVEVHNAKTKPREEQYNSTYRVVSVLTVLHQDWLNGKEYKCKVSNKALPAPIEKTISKAKGQPREPQVYTLPPSRDELTKNQVSLTCLVKGFYPSDIAVEWESNGQPENNYKTTPPVLDSDGSFFLYSKLTVDKSRWQQGNVFSCSVMHEALHNHYTQKSLSLSPGVPLSRTVRCTCISISNQPVNPRSLEKLEIIPASQFCPRVEIIATMKKKGEKRCLNPESKAIKNLLKAVSKERSKRSP

SEQ ID NO: 167 - protein, 1020 aa, artificial
  ACE2 18-732 R273A S645C with IgG4 T256D T307Q and IP10
QSTIEEQAKTFLDKFNHEAEDLFYQSSLASWNYNTNITEENVQNMNNAGDKWSAFLKEQSTLAQMYPLQEIQNLTVKLQLQALQQNGSSVLSEDKSKRLNTILNTMSTIYSTGKVCNPDNPQECLLLEPGLNEIMANSLDYNERLWAWESWRSEVGKQLRPLYEEYVVLKNEMARANHYEDYGDYWRGDYEVNGVDGYDYSRGQLIEDVEHTFEEIKPLYEHLHAYVRAKLMNAYPSYISPIGCLPAHLLGDMWGAFWTNLYSLTVPFGQKPNIDVTDAMVDQAWDAQRIFKEAEKFFVSVGLPNMTQGFWENSMLTDPGNVQKAVCHPTAWDLGKGDFRILMCTKVTMDDFLTAHHEMGHIQYDMAYAAQPFLLRNGANEGFHEAVGEIMSLSAATPKHLKSIGLLSPDFQEDNETEINFLLKQALTIVGTLPFTYMLEKWRWMVFKGEIPKDQWMKKWWEMKREIVGVVEPVPHDETYCDPASLFHVSNDYSFIRYYTRTLYQFQFQEALCQAAKHEGPLHKCDISNSTEAGQKLFNMLRLGKSEPWTLALENVVGAKNMNVRPLLNYFEPLFTWLKDQNKNSFVGWSTDWSPYADQSIKVRISLKSALGDKAYEWNDNEMYLFRCSVAYAMRQYFLKVKNQMILFGEEDVRVANLKPRISFNFFVTAPKNVSDIIPRTEVEKAIRMSRSRINDAFRLNDNSLEFLGIQPTLGESKYGPPCPPCPAPEFLGGPSVFLFPPKPKDTLMISRDPEVTCVVVDVSQEDPEVQFNWYVDGVEVHNAKTKPREEQFNSTYRVVSVLQVLHQDWLNGKEYKCKVSNKGLPSSIEKTISKAKGQPREPQVYTLPPSQEEMTKNQVSLTCLVKGFYPSDIAVEWESNGQPENNYKTTPPVLDSDGSFFLYSRLTVDKSRWQEGNVFSCSVMHEALHNHYTQKSLSLSLGVPLSRTVRCTCISISNQPVNPRSLEKLEIIPASQFCPRVEIIATMKKKGEKRCLNPESKAIKNLLKAVSKERSKRSP

SEQ ID NO: 168 - protein, 1018 aa, artificial
  ACE2 18-732 R273A S645C with IgG1 T256D T307Q and IP10
QSTIEEQAKTFLDKFNHEAEDLFYQSSLASWNYNTNITEENVQNMNNAGDKWSAFLKEQSTLAQMYPLQEIQNLTVKLQLQALQQNGSSVLSEDKSKRLNTILNTMSTIYSTGKVCNPDNPQECLLLEPGLNEIMANSLDYNERLWAWESWRSEVGKQLRPLYEEYVVLKNEMARANHYEDYGDYWRGDYEVNGVDGYDYSRGQLIEDVEHTFEEIKPLYEHLHAYVRAKLMNAYPSYISPIGCLPAHLLGDMWGAFWTNLYSLTVPFGQKPNIDVTDAMVDQAWDAQRIFKEAEKFFVSVGLPNMTQGFWENSMLTDPGNVQKAVCHPTAWDLGKGDFRILMCTKVTMDDFLTAHHEMGHIQYDMAYAAQPFLLRNGANEGFHEAVGEIMSLSAATPKHLKSIGLLSPDFQEDNETEINFLLKQALTIVGTLPFTYMLEKWRWMVFKGEIPKDQWMKKWWEMKREIVGVVEPVPHDETYCDPASLFHVSNDYSFIRYYTRTLYQFQFQEALCQAAKHEGPLHKCDISNSTEAGQKLFNMLRLGKSEPWTLALENVVGAKNMNVRPLLNYFEPLFTWLKDQNKNSFVGWSTDWSPYADQSIKVRISLKSALGDKAYEWNDNEMYLFRCSVAYAMRQYFLKVKNQMILFGEEDVRVANLKPRISFNFFVTAPKNVSDIIPRTEVEKAIRMSRSRINDAFRLNDNSLEFLGIQPTLGDKTHTCPPCPAPELLGGPSVFLFPPKPKDTLMISRDPEVTCVVVDVSHEDPEVKFNWYVDGVEVHNAKTKPREEQYNSTYRVVSVLQVLHQDWLNGKEYKCKVSNKALPAPIEKTISKAKGQPREPQVYTLPPSRDELTKNQVSLTCLVKGFYPSDIAVEWESNGQPENNYKTTPPVLDSDGSFFLYSKLTVDKSRWQQGNVFSCSVMHEALHNHYTQKSLSLSPGVPLSRTVRCTCISISNQPVNPRSLEKLEIIPASQFCPRVEIIATMKKKGEKRCLNPESKAIKNLLKAVSKERSKRSP

SEQ ID NO: 169 - protein, 1028 aa, artificial
  ACE2 18-740 R273A S645C with IgG4 T256D T307Q and IP10
QSTIEEQAKTFLDKFNHEAEDLFYQSSLASWNYNTNITEENVQNMNNAGDKWSAFLKEQSTLAQMYPLQEIQNLTVKLQLQALQQNGSSVLSEDKSKRLNTILNTMSTIYSTGKVCNPDNPQECLLLEPGLNEIMANSLDYNERLWAWESWRSEVGKQLRPLYEEYVVLKNEMARANHYEDYGDYWRGDYEVNGVDGYDYSRGQLIEDVEHTFEEIKPLYEHLHAYVRAKLMNAYPSYISPIGCLPAHLLGDMWGAFWTNLYSLTVPFGQKPNIDVTDAMVDQAWDAQRIFKEAEKFFVSVGLPNMTQGFWENSMLTDPGNVQKAVCHPTAWDLGKGDFRILMCTKVTMDDFLTAHHEMGHIQYDMAYAAQPFLLRNGANEGFHEAVGEIMSLSAATPKHLKSIGLLSPDFQEDNETEINFLLKQALTIVGTLPFTYMLEKWRWMVFKGEIPKDQWMKKWWEMKREIVGVVEPVPHDETYCDPASLFHVSNDYSFIRYYTRTLYQFQFQEALCQAAKHEGPLHKCDISNSTEAGQKLFNMLRLGKSEPWTLALENVVGAKNMNVRPLLNYFEPLFTWLKDQNKNSFVGWSTDWSPYADQSIKVRISLKSALGDKAYEWNDNEMYLFRCSVAYAMRQYFLKVKNQMILFGEEDVRVANLKPRISFNFFVTAPKNVSDIIPRTEVEKAIRMSRSRINDAFRLNDNSLEFLGIQPTLGPPNQPPVSESKYGPPCPPCPAPEFLGGPSVFLFPPKPKDTLMISRDPEVTCVVVDVSQEDPEVQFNWYVDGVEVHNAKTKPREEQFNSTYRVVSVLQVLHQDWLNGKEYKCKVSNKGLPSSIEKTISKAKGQPREPQVYTLPPSQEEMTKNQVSLTCLVKGFYPSDIAVEWESNGQPENNYKTTPPVLDSDGSFFLYSRLTVDKSRWQEGNVFSCSVMHEALHNHYTQKSLSLSLGVPLSRTVRCTCISISNQPVNPRSLEKLEIIPASQFCPRVEIIATMKKKGEKRCLNPESKAIKNLLKAVSKERSKRSP

SEQ ID NO: 170 - protein, 1026 aa, artificial
  ACE2 18-740 R273A S645C with IgG1 T256D T307Q and IP10
QSTIEEQAKTFLDKFNHEAEDLFYQSSLASWNYNTNITEENVQNMNNAGDKWSAFLKEQSTLAQMYPLQEIQNLTVKLQLQALQQNGSSVLSEDKSKRLNTILNTMSTIYSTGKVCNPDNPQECLLLEPGLNEIMANSLDYNERLWAWESWRSEVGKQLRPLYEEYVVLKNEMARANHYEDYGDYWRGDYEVNGVDGYDYSRGQLIEDVEHTFEEIKPLYEHLHAYVRAKLMNAYPSYISPIGCLPAHLLGDMWGAFWTNLYSLTVPFGQKPNIDVTDAMVDQAWDAQRIFKEAEKFFVSVGLPNMTQGFWENSMLTDPGNVQKAVCHPTAWDLGKGDFRILMCTKVTMDDFLTAHHEMGHIQYDMAYAAQPFLLRNGANEGFHEAVGEIMSLSAATPKHLKSIGLLSPDFQEDNETEINFLLKQALTIVGTLPFTYMLEKWRWMVFKGEIPKDQWMKKWWEMKREIVGVVEPVPHDETYCDPASLFHVSNDYSFIRYYTRTLYQFQFQEALCQAAKHEGPLHKCDISNSTEAGQKLFNMLRLGKSEPWTLALENVVGAKNMNVRPLLNYFEPLFTWLKDQNKNSFVGWSTDWSPYADQSIKVRISLKSALGDKAYEWNDNEMYLFRCSVAYAMRQYFLKVKNQMILFGEEDVRVANLKPRISFNFFVTAPKNVSDIIPRTEVEKAIRMSRSRINDAFRLNDNSLEFLGIQPTLGPPNQPPVSDKTHTCPPCPAPELLGGPSVFLFPPKPKDTLMISRDPEVTCVVVDVSHEDPEVKFNWYVDGVEVHNAKTKPREEQYNSTYRVVSVLQVLHQDWLNGKEYKCKVSNKALPAPIEKTISKAKGQPREPQVYTLPPSRDELTKNQVSLTCLVKGFYPSDIAVEWESNGQPENNYKTTPPVLDSDGSFFLYSKLTVDKSRWQQGNVFSCSVMHEALHNHYTQKSLSLSPGVPLSRTVRCTCISISNQPVNPRSLEKLEIIPASQFCPRVEIIATMKKKGEKRCLNPESKAIKNLLKAVSKERSKRSP
